(19) United States
(12) Patent Application Publication
(10) Pub. No.: US 2015/0315248 A1
(43) Pub. Date: Nov. 5, 2015

(54) CLOSTRIDIUM DIFFICILE POLYPEPTIDES AS VACCINE

(71) Applicant: NOVARTIS AG, Basel (CH)

(72) Inventors: Cesira GALEOTTI, Poggibonsi (IT); Rosanna LEUZZI, Siena (IT); Mariagrazia PIZZA, Siena (IT); Maria SCARSELLI, Siena (IT); Meera UNNIKRISHNAN, Kenilworth (GB); Manuele MARTINELLI, Arezzo (IT)

(21) Appl. No.: 14/425,037

(22) PCT Filed: Sep. 19, 2013
(86) PCT No.: PCT/IB2013/058673

§ 371 Date: Feb. 28, 2015

(30) Foreign Application Priority Data
Sep. 19, 2012 (GB) 1216748.2
Sep. 19, 2012 (GB) 1216749.0

(51) Int. Cl. C07K 14/33; A61K 39/08

(52) U.S. Cl. CPC C07K 14/33; A61K 39/08

(57) ABSTRACT

The invention provides methods, proteins, nucleic acids and antibodies for preventing or treating a C. difficile infection in a mammal.

### TECHNICAL FIELD

[0001] This invention relates to polypeptides derived from Clostridium difficile (C. difficile), particularly methods for treating and preventing C. difficile infection using same.

### BACKGROUND ART

[0002] Clostridium difficile is a Gram-positive, rod shaped, anaerobic spore-forming bacterium. The first fully sequenced C. difficile genome was published in 2006 [1] and 3776 predicted coding sequences were identified. C. difficile is a normal component of the gut flora, estimated to be present in 3% of the general population without signs of disease. In situations where the natural balance of the gut flora is disturbed, then C. difficile can become more prevalent. This overgrowth causes the bacterium to start producing toxins under the control of a quorum signalling regulator. The most frequent cause of a disruption to the natural balance of the gut flora is the administration of antibiotics which are deleterious to some gut bacteria, but which do not affect C. difficile. C. difficile is the primary cause of antibiotic associated diarrhoea (AAD), though symptoms may extend to life-threatening pseudomembraneous colitis. The highest prevalence of infection is in elderly hospitalised patients, though infections are on the increase in non-typical groups, such as adolescents and pregnant females [2]. It is has been observed that between 12% and 35% of those infected with C. difficile relapse within 2 months [3].

[0003] C. difficile was only identified as the causative agent of AAD in the 1970s. Since then a number of strategies for combating the infection have been attempted. Specific antibiotics, such as vancomycin, metronidazole, nitazoxanamide, bacitracin or fusidic acid were used initially to treatment for C. difficile infection, and continue to be employed today (see references 4, 5 and 6). Widespread treatment with these antibiotics is not favoured, though, due to the risk of C. difficile and also other gut bacteria becoming resistant over time. Recently, treatment with vaccines based upon the toxoids secreted by the bacterium and passive immunotherapy targeting such toxins have been adapted (references 7 and 8). A toxoid vaccine with and without adjuvant is in phase II trials in patients 18-85 years old to determine efficacy in preventing recurrent CDI in the nine week period after the third dose of this vaccine. Toxoid vaccines typically require repeat administrations and an adjuvant in order to elicit an immune response. Further, their administration is frequently associated with injection site immune reactions. However, toxin-based vaccines only prevent toxin binding, neutralising inflammatory effects; such vaccines are generally unable to prevent colonization completely or clear an existing pathogen from the body. For example, spores may remain meaning that further infection or recurrence of infection with associated symptoms is likely.

[0004] Thus there is a need for improved compositions and methods of treating or preventing C. difficile infection. In particular, there is need for polypeptides that will be useful as vaccine components and that may be used to limit or eliminate the colonization—including spores—in vaccinated subjects, further preventing C. difficile transmission. It is an object of the invention to provide polypeptides and compositions which are effective in raising immune responses against C. difficile for use in the development of vaccines for preventing and/or treating C. difficile associated diseases.

[0005] FIG. 1: Provides summary information on each of the selected polypeptides including Internal Name, Gene Identifier (GI), Locus Tag, Amino Acid Sequence Length (AA), identity of Strain from which the polypeptide was originally isolated, the SEQ ID NOs corresponding to each polypeptide, the SEQ ID NOs of the cloned polypeptides and various primers.

[0006] FIG. 2: Summarises the results of Secretome, NMR and Confocal microscopy experiments.

[0007] FIG. 3: Provides a schematic of the process used in NMR analysis

[0008] FIG. 4: 15N-HSCQ spectra for Diff44

[0009] FIG. 5: Demonstrates the results of Surface-exposure studies by Western Blot

[0010] FIG. 6: Provides representative FACS data for Dif232

[0011] FIG. 7: Provides a summary of data relating to cell binding experiments. Binding assays of recombinant polypeptides on human Vero cells by FACS analysis and on human Vero and Caco-2 cells by confocal microscopy

[0012] FIG. 8: Western blot analysis of total cell extracts of C. difficile reference strains (630, R20291 and M120) and clinical isolates representing different PCR-ribotypes using anti-Dif192 and Anti-Dif44 antibodies. The Dif192 mature form is 647aa and 71.1 kDa. The Dif44 mature form is 286aa and 31 kDa.

[0013] FIG. 9: Provides a summary of results relating to ELISA binding assays.

[0014] FIG. 10: Recognition of C. difficile recombinant polypeptides (100 ng) (A) by sera from hamsters by Western blot by sera from hamsters vaccinated with toxin A and B combination and challenge with C. difficile 630 strain or B1 strain, (B) by serum from hamster not infected.

[0015] FIG. 11: Recognition of C. difficile recombinant polypeptides by human serum antibodies.

[0016] FIG. 12: Recognition of C. difficile recombinant polypeptides by human serum antibodies.

[0017] FIG. 13: Recognition of C. difficile recombinant polypeptides by human serum antibodies.

[0018] FIG. 14: Recognition of C. difficile recombinant polypeptides by mouse serum antibodies. Immunoblotting on recombinant proteins using serum of mice immunized with concentrated supernatants (5) Dif183 (CD3669).

[0019] FIG. 15: Alignment between Dif153 and the C-terminus of the Anthrax Lethal Factor (residues 589-810); Dif153 is homologous to the C-terminus of the Anthrax Lethal Factor; N-terminal domain, necessary for interaction with PA, is missing; the catalytic site (HEXXH) is conserved.

[0020] FIG. 16: Fluorimetric assay showing a weak gelatinase/collagenase activity for Dif153 in the presence of Zinc.

[0021] FIG. 17: Decreasing amounts of recombinant Dif153 were incubated with the same amount of the desired substrate (collagen I-VI, fibronectin). The reaction was carried out at 37° C. for 16 h in the presence of 0.5 mM ZnC12. Reaction products were loaded on gels for SDS-PAGE and then stained with Silver or Comassie.

[0022] FIG. 18: Dif183 contains a GerMN domain.

[0023] FIG. 19: (A) Western blot analysis on strain 630 cell fractions using an anti-Dif183 serum; (B) Immunofluorescence analysis on strain 630 vegetative cells.

[0024] FIG. 20: Analysis of Dif183 presence in culture supernatant fractions by Western blotting.

[0025] FIG. 21: Dif183 deletion mutant has a sporulation/germination phenotype.

[0026] FIG. 22: Schematic represtentation of preferred C. difficile recombinant toxin fragments. ED=enzymatic domain; GT=glucosyl-transferase domain; CP=cystenine protease domain; T—translocation domain; B=binding domain. All domains are soluble with the exception of the T4 and PTA2 domains of TcdA, which are insoluable.

[0027] FIG. 23: Shows temperature fluctuations of vaccinated animals following administration of the toxin fragment antigens with Dif44 or Dif208, and subsequent C. difficile 630 challenge.

[0028] FIG. 24: Shows the number of C. difficile (CPU/100 mg) observed in faecal pellets collected after C. difficile challenge in animals vaccinated with toxin fragment antigens in combination with Dif44 or Dif208.

[0029] FIG. 25: Shows the numbers of C. difficile in the lumen of the caecum (Cae-LA), the lumen of the colon (Col-LA), the tissue of the caecum (Cae-TA) and the tissue of the colon (Col-TA), at the experimental end point for animals vaccinated with toxin fragment antigens in combination with Dif44 or Dif208 and subjected to subsequent C. difficile 630 challenge.

[0030] FIG. 26: Shows the total number of C. difficile isolated at the experimental end point (day 14 after challenge) of all vaccinated groups.

[0031] FIG. 27: Shows the toxin titre in gut samples at the experimental endpoint.

[0032] FIG. 28: Shows the recognition of recombinant ToxAp5_{—}6, ToxB_GT and Dif44 by (A) serum or (B) colon and caeum washes from hamsters 1-5 of Example 15.

[0033] FIG. 29: Shows the recognition of recombinant ToxAp5_{—}6, ToxB_GT and Dif208 by (A) serum or (B) colon and caeum washes from hamsters 6-10 of Example 15.

[0034] FIG. 30: Shows the recognition of various cell wall proteins (cwps) by serum from hamsters 1-5 of Example 15.

### DISCLOSURE OF THE INVENTION

[0035] The invention provides polypeptides comprising an amino acid sequence selected from the group consisting of SEQ ID NOs 79, 81, 93, 105, 111, 113, 125, 133, 139, 141, 153, 165, 171, 173, 185, 187, 189, 300, 322, 357, 359, 361, 433, 435, 437, 439, 441, 443, 445, 447, 449, 451, 453, 455, 457, 459, 461, 463 and 465. The polypeptides have been identified from C. difficile. Particularly polypeptides of the invention are immunogenic and suitable for use in immunogenic compositions, for instance vaccine compositions.

[0036] In one embodiment, the polypeptides of the invention are summarized below and also in FIG. 1.

[0037] Dif44: This protein is also known as “CD0844” and is annotated as cell surface protein cwp25 from C. difficile. The nucleic acid sequences and amino acid sequences of the polypeptide corresponds with the sequences presented in SEQ ID NO: 78 and 138 and SEQ ID NO: 79 and 139 respectively.

[0038] Dif51: This protein is also known as “CD0999” and is annotated as ABC transporter substrate binding protein lipoprotein from C. difficile. The nucleic acid sequences and amino acid sequences of the polypeptide corresponds with the sequences presented in SEQ ID NO: 80 and 140 and SEQ ID NO: 81 and 141 respectively. The nucleic acid sequence and amino acid sequence of the polypeptide wherein the N-terminal cysteine has been deleted corresponds with the sequences presented in SEQ ID NO: 356 and 357 respectively.

[0039] Dif130: This protein is also known as “CD2645” and is annotated as putative extracellular solute binding protein from C. difficile. The nucleic acid sequences and amino acid sequences of the polypeptide are presented in SEQ ID NO: 92 and 152 and SEQ ID NO: 93 and 153 respectively. The nucleic acid sequence and amino acid sequence of the polypeptide wherein the N-terminal cysteine has been deleted corresponds with the sequences presented in SEQ ID NO: 358 and 359 respectively.

[0040] Dif153: This protein is also known as CD2830 and is annotated as a hypothetical protein of 220 aminoacids. BLAST analysis showed homology to Anthrax Lethal Factor proteins, a family of zinc metallopeptidases. In particular, Dif153 shows homology to the C-terminal domain of the Anthrax lethal factor. The N-terminal domain of Anthrax, necessary for interaction with the Protective Antigen, is missing. The catalytic site (HEXXH) is conserved (FIG. 17). The nucleic acid sequence and/or amino acid sequence of the polypeptide comprises the sequences presented in SEQ ID NO: 299, 321 and 434 and SEQ ID NO: 300, 322 and 435 respectively. BLAST analysis showed homology to Anthrax Lethal Factor proteins, a family of zinc metallopeptidases. In particular, Dif153 shows homology to the C-terminal domain of the Anthrax lethal factor. The N-terminal domain of Anthrax, necessary for interaction with the Protective Antigen, is missing. The catalytic site (HEXXH) is conserved (FIG. 15). Detoxification of Dif153 may be achieved by mutating the amino acid sequence or the encoding nucleic acid sequence of this polypeptide including a deletion of all or a portion of the zincin metalloprotease domain and a point mutation in zincin metalloprotease domain which reduces the protease activity. Examples of single mutants of Dif153 (CD2830) are H142A, E143A, E143R, H146A, D149A, H150A, Y178F and C208S. Examples of double mutants of Dif153 (CD2830) are H142A/H146A; H142A/Y178F; H142A/E143R; H142A/E143A; E142A/Y178F relative to the wild-type CT153 (CD2830) polypeptide sequence of SEQ ID NO: 300 and 435. The invention provides also other mutants for the CT153 (CD2830) polypeptide alone or in combination: H142A/H150A and E143A/D149A. The foregoing detoxified immunogenic polypeptides preferably retain at least one epitope or immunogenic fragment of SEQ ID NO: 300 and 435. Nucleic acid sequences and amino acid sequences related to these mutants are summarized in Table 1.

| | Nucleic acid | Amino acid | Primers |
|---|---|---|---|
| Dif153 mutations | SEQ ID NO: | SEQ ID NO: | SEQ ID NO: |
| Dif153 WT | 434 | 435, 300 | |
| Dif153 E143A | 436 | 437 | 472 & 473 |
| Dif153 H150A | 438 | 439 | |
| Dif153 Y178F | 440 | 441 | |
| Dif153 C208S | 442 | 443 | |
| Dif153 H142A | 444 | 445 | 466 & 467 |
| Dif153 H146A | 446 | 447 | 468 & 469 |
| DIF153 D149A | 462 | 463 | |
| DIF153 E143R | 464 | 465 | |
| Dif153 H142A, H146A | 448 | 449 | |
| Dif153 H142A/E143A | 450 | 451 | |
| Dif153 H142A/E143R | 452 | 453 | |
| Dif153 H142A/Y178F | 454 | 455 | |
| Dif153 E143A/Y178F | 456 | 457 | |
| Dif153 H142A/H150A | 458 | 459 | |
| Dif153 E143A/D149A | 460 | 461 | |

[0041] Dif183: This protein is also known as “CD3669” and is annotated as hypothetical protein from C. difficile. The C-terminus contains one copy of the GerMN domain that has been implicated in both sporulation and germination in Bacillus subtilis (FIG. 20) The nucleic acid sequences and amino acid sequences of the polypeptide are presented in SEQ ID NO: 186, 188, 187 and 189 respectively. The nucleic acid sequence and amino acid sequence of the polypeptide wherein the N-terminal cysteine has been deleted corresponds with the sequences presented in SEQ ID NO: 359 and 360 respectively.

[0042] Dif192: This protein is also known as “CD1035” and is annotated as cell surface protein (putative Nacetylmuramoyl-L-alanine amidase) cwp16 from C. difficile. The nucleic acid sequences and amino acid sequences of the polypeptide are presented in SEQ ID NO: 104 and 164 and SEQ ID NO: 105 and 165 respectively.

[0043] Dif208: This protein is also known as “CD2831” and is annotated as a collagen-binding protein sortase substrate from C. difficile. The nucleic acid sequences and amino acid sequences of the polypeptide are presented in SEQ ID NO: 132 and 432 and SEQ ID NO: 133 and 433 respectively. The fragment Dif208A corresponds to amino acids 32-480 of Dif208. The nucleic acid sequences and amino acid sequences of the polypeptide Dif208A are presented in SEQ ID NO: 110 and 170 and SEQ ID NO: 111 and 171 respectively. The fragment Dif208B corresponds to amino acids 481-938 of Dif208. The nucleic acid sequences and amino acid sequences of the polypeptide Dif208B are presented in SEQ ID NO: 112 and 172 and SEQ ID NO: 113 and 173 respectively.

[0044] Dif232: This protein is also known as “CD1031” and is annotated as cell wall anchored protein from C. difficile. The nucleic acid sequences and amino acid sequences of the polypeptide are presented in SEQ ID NO: 124 and 184 and SEQ ID NO: 125 and 185 respectively.

[0045] Particularly preferred polypeptides of the invention are Dif44 and Dif208. These polypeptides have been shown to reduce colonisation of the gut by C. difficile in vivo, and are of particular use in immunotherapeutic compostions.

[0046] Generally, the polypeptides of the invention are polypeptides for use in medicine and in therapy, particularly in relation to the field of C. difficile, for example in passive immunisation against Clostridium difficile Associated Disease (CDAD). The invention also provides the use of such polypeptides in the manufacture of a medicament.

[0047] In a particular embodiment, the polypeptides of the invention are polypeptides for use in preventing, treating or reducing the severity of a C. difficile infection in a mammal. In some embodiments, the invention also provides the use of such compositions in the manufacture of a medicament.

[0048] The polypeptides of the invention and referred to above, particularly Dif44 and Dif208 have surprisingly been shown to reduce colonisation of the gut by C. difficile, when tested in an in vivo model (Example 15). This is particularly relevant to the prevention of spore induce disease relapse, which is one of the most significant clinical issues in C. difficile infection. Experimental vaccines which provide a protective effect against C. difficile have not previously been shown to reduce colonisation of the gut by C. difficile to the same extent as combinations of antigens which include the polypeptides of the invention and referred to above, particularly Dif44 and Dif208.

[0049] The inventors have shown that reduced gut colonisation is observed when the subjects are administered a combination of antigens that elicit a protective effect against C. difficile in combination with either Dif44 or Dif208, and subsequently challenged with C. difficile. This effect is seen in terms of the amount of C. difficile that is shed in faeces at various time points following challenge, or the amount of C. difficile that is recovered from gut washes or tissue at the experimental endpoint. Gut colonisation is reduced in subjects that are administered a combination of antigens that elicit a protective effect against C. difficile in combination with either Dif44 or Dif208, and subsequently challenged with C. difficile, compared to subjects that are administered a combination of antigens that elicits a protective effect against C. difficile and subsequently challenged with C. difficile.

[0050] The polypeptides of the invention and referred to above, particularly Dif44 and Dif208, are thus of particular use in the treatment, prevention or reduction in the severity of C. difficile spore induced disease relapse, or in the treatment, prevention or the reduction of colonisation of the gut by C. difficile. “Reducing” means causing a decrease, preferably a statistically significant decrease, in a parameter. Reduction of colonization of the gut by C. difficile thus refers to causing a decrease in the number of C. difficile bacteria present in the gut of a subject at a particular time point after exposure of the subject to C. difficile, e.g. 1, 2, 3, 4, 5, 6, 7 days, weeks or months after exposure of the subject to C. difficile. The reduction is e.g. in comparison to a subject which has not been administered with the polypeptides, compositions or vaccines of the invention, in comparison with a subject that has been administered a composition that elicits a protective effect against C. difficile (which preferably does not contain one or more of Dif44, Dif51, Dif130, Dif153, Dif183, Dif192, Dif208, Dif208A, and Dif232, particularly which does not contain DIF44 or DIF208), and/or in comparison with a subject which has not been administered with any composition that elicits a protective effect against C. difficile. The reduction may be at least 10, 20, 30, 40 50, 60, 70, 80, 90, 100%.

[0051] The polypeptides of the invention thus can be used e.g. in immunogenic compositions, vaccines, and medical methods as referred to herein, but are particularly useful when they are used in combination with one or more additional antigens, preferably which provide a protective effect against C. difficile, or against CDAD.

[0052] A protective effect against C. difficile or CDAD is observed where administration of the relevant compound (e.g. an antigen or combination of antigens) prevents and/or decreases the likelihood, duration or severity of a subsequent infection or the disease. This can be tested for using methods which are well known in the art, for example those in which the relevant compound is administered to a subject and the subject is challenged with C. difficile. The effect of the challenge is observed e.g. in terms of the percentage of animals which survive challenge, and this value can be compared to the value obtained using an appropriate control, e.g. in the absence of administering any compound, or any compound offering a protective effect.

[0053] Examples of C. difficile antigens which provide a protective effect against C. difficile or CDAD are, for example those disclosed in WO2013/084071, the contents of which are incorporated herein by reference. Assays such as those described in WO2013/084071 can thus be used to determine whether a given compound has such a protective effect. In particular, the full length C. difficile Tox A (or TcdA) antigen, in combination with the full length C. difficile Tox B antigen is said to be a gold standard and thus may serve as a positive control for a protective effect. An antigen that provides a protective effect is thus at least 50, 60, 70, 80, 90, 95 or 100% as effective as this gold standard.

[0054] Preferred C. difficile antigens and combinations thereof which provide a protective effect against C. difficile or against CDAD are disclosed in WO2013/084071. These antigens are referred to also as C. difficile toxin antigens. The immunogenic composition of the invention preferably further comprises one or more additional antigens, preferably which provide a protective effect against C. difficile, or against CDAD. More preferably the additional antigens are C. difficile toxin antigens. The immunogenic composition of the invention preferably further comprises (a) at least one ToxB-GT antigen and (b) at least one TcdA antigen. Preferably, the ToxB-GT antigen and/or the TcdA antigen is/are detoxified.

[0055] Thus the preferred immunogenic compositions of the invention comprise a combination of C. difficile antigens, said combination comprising (a) one or more polypeptide selected from the group consisting of Dif44, Dif51, Dif130, Dif153, Dif183, Dif192, Dif208, Dif208A, and Dif232; (b) at least one ToxB-GT antigen and (c) at least one TcdA antigen, and preferably comprising a combination of C. difficile antigens, said combination comprising (a) at least one polypeptide selected from the group consisting of Dif44 and Dif208; (b) at least one ToxB-GT antigen and (c) at least one TcdA antigen. “Combination” as used here means a divalent, trivalent or multivalent combination of antigens. A combination is preferably capable of eliciting a protective response, and/or treating, preventing or reducing colonisation of the gut by C. difficile. When combinations are used, the individual components may be administered sequentially, simultaneously or separately.

[0056] In some embodiments, the ToxB-GT antigen is a polypeptide that comprises, consists essentially of or consists of an amino acid sequence: (a) having 80% or more identity to SEQ ID NO:18 or SEQ ID NO: 60; and/or b) that is a fragment of at least 7 consecutive amino acids of SEQ ID NO:18 or SEQ ID NO: 60, or of a polypeptide having 80% or more identity to SEQ ID NO:18 or SEQ ID NO: 60 and that comprises an epitope of SEQ ID NO:18 or SEQ ID NO: 60. Preferably the ToxB-GT antigen comprises, consists essentially of or consists of SEQ ID NO: 18.

[0057] In some embodiments, the TcdA antigen is a polypeptide that comprises or consists of an amino acid sequence: (a) having 80% or more identity to SEQ ID NO:1; and/or b) that is a fragment of at least 7 consecutive amino acids of SEQ ID NO:1, or of a polypeptide having 80% or more identity to SEQ ID NO:1 and that comprises an epitope of SEQ ID NO:1.

[0058] In certain embodiments, the immunogenic composition will comprise or further comprise a ToxB-GT antigen and 1, 2, 3, 4, 5, 6, 7, 8, 9, 10, 11, 12, 13, 14, 15 or more TcdA antigens, e.g. 1-10, 1-5, 1-4, 1-3, 1-2, 2-9, 3-8, 4-7, 5-6 TcdA antigens. Preferably, the one or more TcdA antigens are selected from (1) a ToxA-ED antigen (SEQ ID NO: 3), (2) a ToxA-GT antigen (SEQ ID NO: 4), (3) a ToxA-CP antigen (SEQ ID NO:5), (4) a ToxA-T antigen (SEQ ID NO: 6), (5) a ToxA-T4 antigen (SEQ ID NO: 7), (6) a ToxA-B antigen (SEQ ID NO: 8), (7) a ToxA-PTA2 antigen (SEQ ID NO: 9), (8) a ToxA-P5-7 antigen (SEQ ID NO: 10), (9) a ToxA-P5-6 antigen (SEQ ID NO: 11), (10) a ToxA-P9-10 antigen (SEQ ID NO: 12), (11) a ToxA-B2 antigen (SEQ ID NO: 13), (12) a ToxA-B3 antigen (SEQ ID NO: 14), (13) a ToxA-B5 antigen (SEQ ID NO: 15), (14) a ToxA-B6 antigen (SEQ ID NO: 16) or a full-length TcdA antigen (SEQ ID NO:1). More preferably the TcdA antigen is a ToxA-P5-6 antigen which comprises, consists essentially of or consists of SEQ ID NO: 11. As discussed elsewhere herein the one or more TcdA antigens preferably (a) has 80% or more identity to these sequences, and/or (b) is a fragment of at least 7 consecutive amino acids of one or more of these sequences or of a polypeptide having 80% or more identity to one or more of these sequences and comprises an epitope of the relevant sequence.

[0059] In certain embodiments, the immunogenic composition will comprise or further comprise a ToxA-GT antigen and 1, 2, 3, 4, 5, 6, 7, 8, 9 or more TcdB antigens, e.g. 1-10, 1-5, 1-4, 1-3, 1-2, 2-9, 3-8, 4-7, 5-6 TcdA antigens optionally selected from (1) a ToxB-ED antigen (SEQ ID NO: 17), (2) a ToxB-GT antigen (SEQ ID NO: 18), (3) a ToxB-CP antigen (SEQ ID NO:19) (4) a ToxB-T antigen (SEQ ID NO: 20), (5) a ToxB-B antigen (SEQ ID NO: 21), (6) a ToxB-B2 antigen (SEQ ID NO: 22) (7) ToxB-B7 (SEQ ID NO: 23) or (8) a full-length TcdB antigen (SEQ ID NO:2). Preferably, the one or more TcdB antigen is a ToxB-GT antigen, particularly an antigen which comprises, consists essentially of or consists of SEQ ID NO: 18.

[0060] In particular embodiments, the immunogenic composition comprises or further comprises a ToxB-GT antigen and a TcdA antigen, wherein the TcdA antigen is selected from the group consisting of ToxA-P5-6 and ToxA-B2. More particularly, the TcdA antigen is ToxA-P5-6. Yet more particularly the ToxA-P5-6 antigen will comprise, consist essentially or consist of an amino acid sequence: (a) having 80% or more identity to SEQ ID NO: 11; and/or b) that is a fragment of at least 7 consecutive amino acids of SEQ ID NO: 11, or of a polypeptide having 80% or more identity to SEQ ID NO: 11 and that comprises an epitope of SEQ ID NO: 11.

### ToxB-GT Antigens

[0061] The full-length TcdB antigen (also referred to herein as ToxB and ToxinB) comprises the amino acid sequence of SEQ ID NO: 2 (encoded by the nucleic acid sequence of SEQ ID NO: 31). Detoxified TcdB antigen is referred to herein as Toxoid B. The abbreviation “ToxB-GT” refers to the glucosyl transferase domain of TcdB, which is located within the N-terminal region of the enzymatic domain (ED) (and represented in FIG. 22). The ToxB-GT domain (SEQ ID NO: 18, encoded by the nucleic acid sequence of SEQ ID NO: 47) is a fragment of TcdB that corresponds to amino acids 1-543 of SEQ ID NO: 2.

[0062] The ToxB-GT antigen included in the compositions of the invention is a polypeptide that comprises or consists of an amino acid sequence: (a) having 50% or more identity (e.g. 60%, 65%, 70%, 75%, 80%, 85%, 90%, 91%, 92%, 93%, 94%, 95%, 96%, 97%, 98%, 98.5%, 99%, 99.5%, 99.8%, 99.9%, or more) to SEQ ID NO: 18; and/or (b) that is a fragment of at least “n” consecutive amino acids of SEQ ID NO: 18, or of a polypeptide having 50% or more identity to SEQ ID NO:18, wherein “n” is 7 or more (e.g. 8, 10, 12, 14, 16, 18, 20, 25, 30, 35, 40, 45, 50, 60, 70, 80, 90, 100, 150, 250, 300, 400, 500, 540, or more). Preferred fragments comprise an epitope of SEQ ID NO: 18. Other preferred fragments lack one or more amino acids (e.g. 1, 2, 3, 4, 5, 6, 7, 8, 9, 10, 15, 20, 25 or more) from the C-terminus and/or one or more amino acids (e.g. 1, 2, 3, 4, 5, 6, 7, 8, 9, 10, 15, 20, 25 or more) from the N-terminus of SEQ ID NO: 18 while retaining at least one epitope of SEQ ID NO:18. Amino acid fragments of ToxB-GT may thus comprise an amino acid sequence of e.g. up to 30, up to 40, up to 50, up to 60, up to 70, up to 80, up to 90, up to 100, up to 125, up to 150, up to 175, up to 200, up to 250, up to 300, up to 350, up to 400, up to 450, up to 500, or up to 540, consecutive amino acid residues of SEQ ID NO: 18.

[0063] The ToxB-GT antigen included in the compositions of the invention may be detoxified. Detoxification may be achieved by mutating the amino acid sequence or the encoding nucleic acid sequence of the wild-type ToxB-GT antigen using any appropriate method known in the art e.g. site-directed mutagenesis. Preferably, the ToxB-GT antigen comprises one or more amino acid substitutions (i.e. 1, 2, 3, 4, 5, 6, 7, 8, 9, 10, 11, 12, 13, 14, 15, 16, 17, 18, 19, 20, 25, 30, or more mutations), relative to the wild-type ToxB-GT antigen sequence of SEQ ID NO:18. For example, the ToxB-GT antigen comprises one or more amino acid substitutions (i.e. 1, 2, 3, 4, 5, 6, 7, 8, 9, 10, 11, 12, 13, 14, 15, 16, 17, 18, 19, 20, 21, 22, 23, 24, 25, or more mutations), e.g. at amino acid positions 17, 102, 139, 269, 270, 273, 284, 286, 288, 384, 449, 444, 445, 448, 449, 450, 451, 452, 455, 461, 463, 472, 515, 518, and/or 520, relative to the wild-type ToxB-GT antigen sequence of SEQ ID NO:18. For example, the ToxB-GT antigen may comprise substitutions at 1, 2, 3, 4 or 5 positions corresponding to amino acids 270, 273, 284, 286 and/or 288 of the Tox-GT antigen sequence of SEQ ID NO: 18. In particular, 1, 2, 3, 4 or 5 amino acids at positions corresponding to amino acids 270, 273, 284, 286 and/or 288 of the ToxB-GT antigen sequence of SEQ ID NO:18 may be substituted, preferably by alanine residues. The amino acid sequence of a detoxified ToxB-GT antigen having alanine substitutions at these positions is provided in SEQ ID NO: 60.

[0064] Where the ToxB-GT comprises two amino acid substitutions, the substitutions are preferably not at amino acid positions 102 and 278, or amino acid positions 102 and 288, of the ToxB-GT antigen sequence of SEQ ID NO:18. The detoxified ToxB-GT antigen included in the compositions of the invention may thus be a polypeptide that comprises or consists of an amino acid sequence: (a) having 50% or more identity (e.g. 60%, 65%, 70%, 75%, 80%, 85%, 90%, 91%, 92%, 93%, 94%, 95%, 96%, 97%, 98%, 98.5%, 99%, 99.5%, 99.8%, 99.9%, or more) to SEQ ID NO: 60; and/or (b) that is a fragment of at least “n” consecutive amino acids of SEQ ID NO: 60, or of a polypeptide having 50% or more identity to SEQ ID NO: 60, wherein “n” is 7 or more (e.g. 8, 10, 12, 14, 16, 18, 20, 25, 30, 35, 40, 45, 50, 60, 70, 80, 90, 100, 150, 250, 300, 400, 500, 540, or more). Amino acid fragments of detoxified ToxB-GT may thus comprise an amino acid sequence of e.g. up to 30, up to 40, up to 50, up to 60, up to 70, up to 80, up to 90, up to 100, up to 125, up to 150, up to 175, up to 200, up to 250, up to 300, up to 350, up to 400, up to 450, up to 500, or up to 540, consecutive amino acid residues of SEQ ID NO: 60. Preferred fragments comprise an epitope of SEQ ID NO: 60. Other preferred fragments lack one or more amino acids (e.g. 1, 2, 3, 4, 5, 6, 7, 8, 9, 10, 15, 20, 25 or more) from the C-terminus and/or one or more amino acids (e.g. 1, 2, 3, 4, 5, 6, 7, 8, 9, 10, 15, 20, 25 or more) from the N-terminus of SEQ ID NO: 60 while retaining at least one epitope of SEQ ID NO 60.

### ToxA-GT Antigens

[0065] The full-length TcdA antigen (also referred to herein as ToxA and Toxin A) comprises the amino acid sequence of SEQ ID NO: 1 (encoded by the nucleic acid sequence of SEQ ID NO: 30). Detoxified TcdA antigen is referred to herein as Toxoid A. The abbreviation “ToxA-GT” refers to the glucosyl transferase domain of TcdA, which is located within the N-terminal region of the enzymatic domain (ED). The ToxA-GT domain (SEQ ID NO: 4, encoded by the nucleic acid sequence of SEQ ID NO: 33) is a fragment of TcdA that corresponds to amino acids 1-541 of SEQ ID NO: 1.

[0066] The ToxA-GT antigen included in the compositions of the invention is a polypeptide that comprises or consists of an amino acid sequence: (a) having 50% or more identity (e.g. 60%, 65%, 70%, 75%, 80%, 85%, 90%, 91%, 92%, 93%, 94%, 95%, 96%, 97%, 98%, 98.5%, 99%, 99.5%, 99.8%, 99.9%, or more) to SEQ ID NO: 4; and/or (b) that is a fragment of at least “n” consecutive amino acids of SEQ ID NO: 4, or of a polypeptide having 50% or more identity to SEQ ID NO:4, wherein “n” is 7 or more (e.g. 8, 10, 12, 14, 16, 18, 20, 25, 30, 35, 40, 45, 50, 60, 70, 80, 90, 100, 150, 250, 300, 400, 500, 540, or more). Preferred fragments comprise an epitope of SEQ ID NO: 4. Other preferred fragments lack one or more amino acids (e.g. 1, 2, 3, 4, 5, 6, 7, 8, 9, 10, 15, 20, 25 or more) from the C-terminus and/or one or more amino acids (e.g. 1, 2, 3, 4, 5, 6, 7, 8, 9, 10, 15, 20, 25 or more) from the N-terminus of SEQ ID NO: 4 while retaining at least one epitope of SEQ ID NO:4.

[0067] Amino acid fragments of ToxA-GT may thus comprise an amino acid sequence of e.g. up to 30, up to 40, up to 50, up to 60, up to 70, up to 80, up to 90, up to 100, up to 125, up to 150, up to 175, up to 200, up to 250, up to 300, up to 350, up to 400, up to 450, up to 500, or up to 540, consecutive amino acid residues of SEQ ID NO: 4.

[0068] The ToxA-GT antigen included in the compositions of the invention may be detoxified. Detoxification may be achieved by mutating the amino acid sequence or the encoding nucleic acid sequence of the wild-type ToxA-GT antigen using any appropriate method known in the art e.g. site-directed mutagenesis. Preferably, the ToxA-GT antigen comprises one or more amino acid substitutions (i.e. 1, 2, 3, 4, 5, 6, 7, 8, 9, 10, 11, 12, 13, 14, 15, 16, 17, 18, 19, 20, 25, 30, or more mutations), relative to the wild-type ToxA-GT antigen sequence of SEQ ID NO:4. For example, the ToxA-GT antigen may comprise substitutions at 1, 2 or 3 positions corresponding to amino acids 283, 285 and 287 of the ToxA-GT antigen sequence of SEQ ID NO:4. In particular, 1, 2, or 3 amino acids at positions corresponding to amino acids 283, 285 and 287 of the ToxA-GT antigen sequence of SEQ ID NO:4 may be substituted, preferably by alanine residues. The amino acid sequence of a detoxified ToxA-GT antigen having alanine substitutions at these positions is provided in SEQ ID NO: 56.

[0069] Where the ToxA-GT antigen comprises one amino acid substitution, the substitution is preferably not at amino acid position 278 of the ToxA-GT antigen sequence of SEQ ID NO: 4. Where the ToxA-GT antigen comprises two amino acid substitutions, the substitutions are preferably not at amino acid positions 101 and 278, of the ToxA-GT antigen sequence of SEQ ID NO:4. Where the ToxA-GT antigen comprises three amino acid substitutions, the substitutions are preferably not at amino acid positions 101, 278 and 519, or amino acid positions 101, 287 and 519, of the ToxA-GT antigen sequence of SEQ ID NO:4.

[0070] The detoxified ToxA-GT antigen included in the compositions of the invention may thus be a polypeptide that comprises or consists of an amino acid sequence: (a) having 50% or more identity (e.g. 60%, 65%, 70%, 75%, 80%_{,} 85%, 90%, 91%_{,} 92%, 93%, 94%, 95%, 96%, 97%, 98%, 98.5%, 99%, 99.5%, 99.8%, 99.9%, or more) to SEQ ID NO: 56; and/or (b) that is a fragment of at least “n” consecutive amino acids of SEQ ID NO: 56, or of a polypeptide having 50% or more identity to SEQ ID NO: 56, wherein “n” is 7 or more (e.g. 8, 10, 12, 14, 16, 18, 20, 25, 30, 35, 40, 45, 50, 60, 70, 80, 90, 100, 150, 250, 300, 400, 500, 540, or more). Preferred fragments comprise an epitope of SEQ ID NO: 56. Other preferred fragments lack one or more amino acids (e.g. 1, 2, 3, 4, 5, 6, 7, 8, 9, 10, 15, 20, 25 or more) from the C-terminus and/or one or more amino acids (e.g. 1, 2, 3, 4, 5, 6, 7, 8, 9, 10, 15, 20, 25 or more) from the N-terminus of SEQ ID NO: 56 while retaining at least one epitope of SEQ ID NO: 56. Amino acid fragments of detoxified ToxB-GT may thus comprise an amino acid sequence of e.g. up to 30, up to 40, up to 50, up to 60, up to 70, up to 80, up to 90, up to 100, up to 125, up to 150, up to 175, up to 200, up to 250, up to 300, up to 350, up to 400, up to 450, up to 500, or up to 540, consecutive amino acid residues of SEQ ID NO: 56.

[0071] TcdA antigen: The TcdA antigen is a polypeptide that comprises or consists of an amino acid sequence: (a) having 80% or more identity to SEQ ID NO:1; and/or b) that is a fragment of at least 7 consecutive amino acids of SEQ ID NO:1, or of a polypeptide having 80% or more identity to SEQ ID NO:1 and that comprises an epitope of SEQ ID NO:1. Further TcdA antigens, include (1) a ToxA-ED antigen (SEQ ID NO: 3), (2) a ToxA-GT antigen (SEQ ID NO: 4), (3) a ToxA-CP antigen (SEQ ID NO:5), (4) a ToxA-T antigen (SEQ ID NO: 6), (5) a ToxA-T4 antigen (SEQ ID NO: 7), (6) a ToxA-B antigen (SEQ ID NO: 8), (7) a ToxA-PTA2 antigen (SEQ ID NO: 9), (8) a ToxA-P5-7 antigen (SEQ ID NO: 10), (9) a ToxA-P5-6 antigen (SEQ ID NO: 11), (10) a ToxA-P9-10 antigen (SEQ ID NO: 12), (11) a ToxA-B2 antigen (SEQ ID NO: 13), (12) a ToxA-B3 antigen (SEQ ID NO: 14), (13) a ToxA-B5 antigen (SEQ ID NO: 15), (14) a ToxA-B6 antigen (SEQ ID NO: 16) or a full-length TcdA antigen (SEQ ID NO:1), represented in FIG. 22.

[0072] Preferred polypeptides for use with the invention comprise an amino acid sequence: (a) having 50% or more identity (e.g. 60%, 65%, 70%, 75%, 80%, 85%, 90%, 91%, 92%, 93%, 94%, 95%, 96%, 97%, 98%, 99%, 99.5% or more) to SEQ ID NOs:1, 2, 3, 4, 5, 6, 7, 8, 9, 10, 11, 12, 13, 14, 15, 16, 17, 18, 19, 20, 21, 22, 23, 54, 56, 58, 60, 62, 64, 79, 81, 93, 105, 111, 113, 125, 133, 139, 141, 153, 165, 171, 173, 185, 187, 189, 300, 322, 357, 359, 361, 433, 435, 437, 439, 441, 443, 445, 447, 449, 451, 453, 455, 457, 459, 461, 463 or 465, e.g. 90% identity or more, or 95% identity or more, or 99% identity or more; and/or (b) comprising a fragment of at least ‘n’ consecutive amino acids of SEQ ID NOs, wherein ‘n’ is 7 or more (e.g. 8, 10, 12, 14, 16, 18, 20, 25, 30, 35, 40, 50, 60, 70, 80, 90, 100, 150, 200, 250 or more; e.g. 20 or more; or e.g. 50 or more; or e.g. 80 or more). These polypeptides include variants of SEQ ID NOs: 1, 2, 3, 4, 5, 6, 7, 8, 9, 10, 11, 12, 13, 14, 15, 16, 17, 18, 19, 20, 21, 22, 23, 54, 56, 58, 60, 62, 64, 79, 81, 93, 105, 111, 113, 125, 133, 139, 141, 153, 165, 171, 173, 185, 187, 189, 300, 322, 357, 359, 361, 433, 435, 437, 439, 441, 443, 445, 447, 449, 451, 453, 455, 457, 459, 461, 463 or 465. Preferred fragments of (b) comprise an epitope from SEQ ID NOs:1, 2, 3, 4, 5, 6, 7, 8, 9, 10, 11, 12, 13, 14, 15, 16, 17, 18, 19, 20, 21, 22, 23, 54, 56, 58, 60, 62, 64, 79, 81, 93, 105, 111, 113, 125, 133, 139, 141, 153, 165, 171, 173, 185, 187, 189, 300, 322, 357, 359, 361, 433, 435, 437, 439, 441, 443, 445, 447, 449, 451, 453, 455, 457, 459, 461, 463 or 465. Other preferred fragments lack one or more amino acids (e.g. 1, 2, 3, 4, 5, 6, 7, 8, 9, 10, 15, 20, 25 or more) from the C-terminus and/or one or more amino acids (e.g. 1, 2, 3, 4, 5, 6, 7, 8, 9, 10, 15, 20, 25 or more) from the N-terminus of SEQ ID NOs: 1, 2, 3, 4, 5, 6, 7, 8, 9, 10, 11, 12, 13, 14, 15, 16, 17, 18, 19, 20, 21, 22, 23, 54, 56, 58, 60, 62, 64, 79, 81, 93, 105, 111, 113, 125, 133, 139, 141, 153, 165, 171, 173, 185, 187, 189, 300, 322, 357, 359, 361, 433, 435, 437, 439, 441, 443, 445, 447, 449, 451, 453, 455, 457, 459, 461, 463 or 465 while retaining at least one epitope of SEQ ID NO:1, 2, 3, 4, 5, 6, 7, 8, 9, 10, 11, 12, 13, 14, 15, 16, 17, 18, 19, 20, 21, 22, 23, 54, 56, 58, 60, 62, 64, 79, 81, 93, 105, 111, 113, 125, 133, 139, 141, 153, 165, 171, 173, 185, 187, 189, 300, 322, 357, 359, 361, 433, 435, 437, 439, 441, 443, 445, 447, 449, 451, 453, 455, 457, 459, 461, 463 or 465. Amino acid fragments of polypeptides of the invention may thus comprise an amino acid sequence of e.g up to 30, up to 40, up to 50, up to 60, up to 70, up to 80, up to 90, up to 100, up to 125, up to 150, up to 175, up to 200, up to 250, up to 300, up to 350, up to 400, up to 450, up to 500, up to 550, up to 600, up to 650, up to 700, consecutive amino acid residues of SEQ ID NOs: 1, 2, 3, 4, 5, 6, 7, 8, 9, 10, 11, 12, 13, 14, 15, 16, 17, 18, 19, 20, 21, 22, 23, 54, 56, 58, 60, 62, 64, 79, 81, 93, 105, 111, 113, 125, 133, 139, 141, 153, 165, 171, 173, 185, 187, 189, 300, 322, 357, 359, 361, 433, 435, 437, 439, 441, 443, 445, 447, 449, 451, 453, 455, 457, 459, 461, 463 or 465. Other fragments omit one or more polypeptide domains. For example, a natural leader peptide and/or sortase recognition sequence may be omitted. As discussed elsewhere, preferred polypeptides that inhibit gut colonisation by C. difficile are Dif44 and Dif208 (ie SEQ ID NOS: 79, 139, 133 and 433, as well as SEQ ID NOs 111, 171, 113 and 173 relating to 208A and 208B fragments). Preferred C. difficile toxin antigens are ToxB_GT (SEQ ID NOS 18 and 60) and ToxA_p5-6 (SEQ ID NO 11).

[0073] The term “polypeptide” or “protein” refers to amino acid polymers of any length. The polymer may be linear or branched, it may comprise modified amino acids, and it may be interrupted by non-amino acids. The terms also encompass an amino acid polymer that has been modified naturally or by intervention; for example, disulfide bond formation, glycosylation, lipidation, acetylation, phosphorylation, or any other manipulation or modification, such as conjugation with a labelling component. Also included are, for example, polypeptides containing one or more analogs of an amino acid (including, for example, unnatural amino acids, etc.), as well as other modifications known in the art. Polypeptides can occur as single chains or associated chains.

[0074] Polypeptides of the invention can take various forms (e.g. native, fusions, glycosylated, non-glycosylated, lipidated, non-lipidated, phosphorylated, non-phosphorylated, myristoylated, non-myristoylated, monomeric, multimeric, particulate, denatured, etc.). For instance, a polypeptide of the invention may not have an N-terminal cysteine. The invention provides also a polypeptide wherein the N-terminal cysteine has been deleted (e.g. Dif51 (SEQ ID NO: 357), Dif130 (SEQ ID NO: 359) and Dif183 (SEQ ID NO: 361)). A polypeptide of the invention may not have an anchor domain (e.g. Dif208 (SEQ ID NO: 433), DIf208B (SEQ ID NO: 173) and Dif232 (SEQ ID NO: 185).

[0075] In some embodiments, the degree of sequence identity is greater than 50%, 60%, 70%, 80%, 90%, 95%, 99% or more (e.g. to the sequences referred to herein and present in the sequence listing). These polypeptides include homologs, orthologs, allelic variants and functional mutants. Typically, 50% identity or more between two polypeptides is considered to be an indication of functional equivalence. Identity between proteins may be determined by the Smith-Waterman homology search algorithm as implemented in the MPSRCH program (Oxford Molecular), using an affine gap search with parameters gap open penalty=12 and gap extension penalty=1.

[0076] In another embodiment fragments of the polypeptides of the invention may be used. The fragments should comprise at least n consecutive amino acids from the sequences and, depending on the particular sequence, n is 10 or more (e.g. 12, 14, 16, 18, 20, 30, 40, 50, 60, 70, 80, 90, 100 or more). The fragments may thus comprise an amino acid sequence of e.g. up to 30, up to 40, up to 50, up to 60, up to 70, up to 80, up to 90, up to 100, up to 125, up to 150, up to 175, up to 200, up to 250, up to 300, up to 350, up to 400, up to 450, up to 500, up to 640, or up to 1105 consecutive amino acid residues. The fragments may thus comprise an amino acid sequence of e.g. less then 30, less then 40, less then 50, less then 60, less then 70, less then 80, less then 90, less then 100, less then 125, less then 150, less then 175, less then 200, less then 250, less then 300, less then 350, less then 400, less then 450, less then 500, less then 640, or less then 1105 consecutive amino acid residues. In certain embodiments amino acid fragments may include polypeptides comprising an amino acid sequence of no more than 50, no more than 60, no more than 75, no more than 100, no more than 150, no more than 200, no more than 250, no more than 300, no more than 350, no more than 400 amino acid residues.

[0077] Preferred fragments comprise an epitope or are immunogenic fragments. Particularly the fragments may comprise one or more epitopes from the sequence. Other fragments are (a) the N-terminal signal peptides of the polypeptide of the invention, (b) the polypeptide of the invention, but without their N-terminal signal peptides, and (c) the polypeptide of the invention, but without their N-terminal amino acid residue. In particular, the invention provides the fragments Dif208A (CD2831) and Dif208B (CD2831). The amino sequences for these fragments are summarized in FIG. 1.

[0078] As used herein the term “fragment” refers to a sequence that is a subset of another sequence. When used in the context of a nucleic acid or amino acid sequence the terms “fragment” and “subsequence” are used interchangeably. These terms are used to refer to a part or portion of an intact or complete wild-type polypeptide but which comprise fewer amino acid residues than an intact or complete wild-type polypeptide. Thus, the term refers to truncated or shorter amino acid sequences corresponding to one or more regions of a wild-type or reference polypeptide. One example of a fragment is an epitope sequence. A fragment or subsequence of an amino acid sequence can be any number of residues that is less than that found in the naturally occurring, or reference, polypeptide. Where the invention concerns an “epitope”, this epitope may be a B-cell epitope and/or a T-cell epitope. Such epitopes can be identified empirically (e.g. using PEPSCAN [9,10] or similar methods), or they can be predicted (e.g. using the Jameson-Wolf antigenic index [11], matrix-based approaches [12], MAPITOPE [13], TEPITOPE [14,15], neural networks [16], OptiMer & EpiMer [17, 18], ADEPT [19], Tsites [20], hydrophilicity [21], antigenic index [22] or the methods disclosed in [23-27, etc.]. Epitopes are the parts of an antigen that are recognised by and bind to the antigen binding sites of antibodies or T-cell receptors, and they may also be referred to as “antigenic determinants”.

[0079] It will be clear to those skilled in the art that, whilst such fragments are truncated or shorter fragments of a reference sequence, such fragments may be modified to comprise additional sequences not found in the reference polypeptide, for example, to form fusion polypeptides, include ‘tag’ sequences such as His tags or Glutathione 5-transferase (GST) tags, linker sequences and the like. Thus, in such modified fragments the amino group of the N terminal amino acid of the fragment is not linked by a peptide bond to the carboxyl group of an amino acid to which it is linked in the reference polypeptide and/or the carboxyl group of the C terminal amino acid of the fragment is not linked by a peptide bond to the amino group of an amino acid to which it is linked in the reference polypeptide.

[0080] The percent identity of a first polypeptide and a second polypeptide is generally determined by counting the number of matched positions between the first and second polypeptides and dividing that number by the total length of the shortest polypeptide followed by multiplying the resulting value by 100. For fragments of polypeptides this value is usually around 100% and therefore has little meaning. Therefore, in the context of fragments of the present invention, the term “proportion of reference polypeptide” (expressed as a percentage) is used. Proportion of reference polypeptide is calculated by counting the number of matched positions between the fragment and reference polypeptides and dividing that number by the total length of the reference polypeptide followed by multiplying the resulting value by 100. Particularly, fragments will comprise less than 90, 80, 70, 65, 60, 55, 50, 45, 40, 35, 30, 25 or less than 20% of the sequence of the reference polypeptide.

[0081] Polypeptides of use e.g. in the compositions, vaccines and methods of the invention thus may have the sequences recited in the sequence listing, or may be variants and/or fragments thereof, as discussed elsewhere. To the extent that such variants and/or fragments are used, they share the functional properties of the sequences recited in the sequence listing. For example, the variants and/or fragments of the C. difficile toxin sequences referred to in the sequence listing preferably share the ability of polypeptides having the recited sequences to provide a protective effect against C. difficile (e.g. provide a protective effect which is at least 50, 60, 70, 80, 90, 95 or 100% of that shown by the relevant or corresponding C. difficile toxin sequence referred to in the sequence listing). The variants and/or fragments of the C. difficile polypeptides Dif 44, Dif 51, Dif130, Dif153, Dif183, Dif192, Dif208, and Dif232 referred to in the sequence listing preferably share the ability of polypeptides having the recited sequences to reduce colonisation of the gut by C. difficile (e.g. providing a reduction in the colonisation of the gut by C. difficile which is at least 50, 60, 70, 80, 90, 95 or 100% of that shown by the relevant or corresponding C. difficile polypeptide Dif 44, Dif 51, Dif130, Dif153, Dif183, Dif192, Dif208, and Dif232 referred to in the sequence listing).

[0082] Polypeptides used with the invention can be prepared by various means (e.g. recombinant expression, purification from cell culture, chemical synthesis, etc.). Generally, the polypeptides of the invention are provided in purified or substantially purified form i.e. substantially free from other polypeptides (e.g. free from naturally-occurring polypeptides), particularly from other C. difficile or host cell polypeptides, and are generally at least about 50% pure (by weight), and usually at least about 90% pure i.e. less than about 50%, and more typically less than about 10% (e.g. 5%) of a composition is made up of other expressed polypeptides. Thus the polypeptides in the compositions are separated from the whole organism with which the molecule is expressed.

[0083] In a preferred embodiment, the invention provides a polypeptide comprising, consisting essentially of or consisting of an amino acid sequence selected from the group consisting of SEQ ID NOs 79, 81, 93, 105, 111, 113, 125, 133, 139, 141, 153, 165, 171, 173, 185, 187, 189, 300, 322, 357, 359, 361, 433, 435, 437, 439, 441, 443, 445, 447, 449, 451, 453, 455, 457, 459, 461, 463 and 465 that is immunogenic.

[0084] The term “immunogenic” in the context of a polypeptide or protein described herein is used to mean that the antigen or the polypeptide is capable of eliciting an immune response, such as humoral or cellular immune response, and preferably both, against the wild-type C. difficile protein from which it is derived, for example, when used to immunise a subject (preferably a mammal, more preferably a human or a mouse). An immunogenic polypeptide is generally referred to as antigenic. A molecule is “antigenic” when it is capable of specifically interacting with an antigen recognition molecule of the immune system, such as an immunoglobulin (antibody) or T cell antigen receptor. An antigenic polypeptide contains an epitope of at least about five, and particularly at least about 10, at least 15, at least 20 or at least 50 amino acids. An antigenic portion of a polypeptide, also referred to as an epitope, can be that portion that is immunodominant for antibody or T cell receptor recognition, or it can be a portion used to generate an antibody to the molecule by conjugating the antigenic portion to a carrier polypeptide for immunization. The skilled person will recognize that a molecule that is antigenic need not be itself immunogenic, for example, some antigens require the presence of an adjuvant or carrier to render them capable of eliciting an immune response.

[0085] The term “antigen” refers to a molecule against which a subject can initiate an immune response, eg a humoral and/or cellular immune response. An “immunological response” to a composition or vaccine is the development in the host of a cellular and/or antibody-mediated immune response to a composition or vaccine of interest. Usually, an “immunological response” includes but is not limited to one or more of the following effects: the production of antibodies, B cells, helper T cells, and/or cytotoxic T cells, directed specifically to an antigen or antigens included in the composition or vaccine of interest. Preferably, the subject will display either a therapeutic or protective immunological response such that resistance to new infection will be enhanced and/or the clinical severity of the disease reduced. Such protection will be demonstrated by either a reduction of or lack of symptoms normally displayed by an infected subject, a quicker recovery time and/or a lowered pathogen or bacterial load in an infected host. The term “immunogenic” protein or polypeptide as used herein also refers to an amino acid sequence which elicits an immunological response as described above.

Hybrid C. difficile Polypeptides

[0086] Polypeptides used in the invention may be present in a composition as individual separate polypeptides. Where more than one polypeptide is used, however, they do not have to be present as separate polypeptides. Instead, at least two (e.g. 2, 3, 4, 5, or more) polypeptides can be expressed as a single polypeptide chain (a ‘hybrid’ polypeptide). Hybrid polypeptides offer two main advantages: first, a polypeptide that may be unstable or poorly expressed on its own can be assisted by adding a suitable hybrid partner that overcomes the problem; second, commercial manufacture is simplified as only one expression and purification need be employed in order to produce two polypeptides which are both antigenically useful. A hybrid polypeptide of at least two polypeptides may also be more immunogenic than one or more of the at least two polypeptides alone or in simple admixture. The hybrid polypeptide may comprise two or more polypeptide sequences from each of the polypeptides of the invention, or two or more variants of the same polypeptide in the cases in which the sequence has partial variability across strains. Hybrids consisting of amino acid sequences from two, three, four, five, six, seven, eight, nine, or ten polypeptides are useful. In some embodiments, hybrids consisting of amino acid sequences from two, three, four, or five polypeptides are used, such as two or three polypeptides. Different hybrid polypeptides may be mixed together in a single formulation. Hybrids may be combined with non-hybrid polypeptides. Within such combinations, a polypeptide may be present in more than one hybrid polypeptide and/or as a non-hybrid polypeptide. It is typical, however, that a polypeptide is present either as a hybrid or as a non-hybrid, but not as both. The hybrid polypeptides can also be combined with conjugates or non-C. difficile polypeptides as described below.

[0087] Hybrid polypeptides can be represented by the formula NH₂-A-{-X-L-}ₙ-B—COOH, wherein: X is an amino acid sequence of a C. difficile polypeptide, as described above; L is an optional linker amino acid sequence; A is an optional N-terminal amino acid sequence; B is an optional C-terminal amino acid sequence; n is an integer of 2 or more (e.g. 2, 3, 4, 5, 6, etc.). Usually n is 2 or 3. If a —X— moiety has a leader peptide sequence in its wild-type form, this may be included or omitted in the hybrid polypeptide. In some embodiments, the leader peptides will be deleted except for that of the —X— moiety located at the N-terminus of the hybrid polypeptide i.e. the leader peptide of X₁ will be retained, but the leader peptides of X₂ . . . Xₙ will be omitted. This is equivalent to deleting all leader peptides and using the leader peptide of X₁ as moiety -A-. For each n instances of {—X-L-}, linker amino acid sequence -L- may be present or absent. For instance, when n=2 the hybrid may be NH₂—X₁-L₁-X₂-L₂-COOH, NH₂—X₁—X₂—COOH, NH₂—X₁-L₁-X₂—COOH, NH₂—X₁—X₂-L₂-COOH, etc. Linker amino acid sequence(s) -L- will typically be short (e.g. 20 or fewer amino acids i.e. 20, 19, 18, 17, 16, 15, 14, 13, 12, 11, 10, 9, 8, 7, 6, 5, 4, 3, 2, 1). Examples comprise short peptide sequences which facilitate cloning, poly-glycine linkers (i.e. comprising Glyₙ where n=2, 3, 4, 5, 6, 7, 8, 9, 10 or more), and histidine tags (i.e. His where n=3, 4, 5, 6, 7, 8, 9, 10 or more). Other suitable linker amino acid sequences will be apparent to those skilled in the art. A useful linker is GSGGGG (SEQ ID NO:351) or GSGSGGGG (SEQ ID NO: 352), with the Gly-Ser dipeptide being formed from a BamHI restriction site, thus aiding cloning and manipulation, and the (Gly)₄ tetrapeptide being a typical poly-glycine linker. Other suitable linkers, particularly for use as the final Lₙ are ASGGGS (SEQ ID NO: 353) or a Leu-Glu dipeptide. -A- is an optional N-terminal amino acid sequence. This will typically be short (e.g. 40 or fewer amino acids i.e. 40, 39, 38, 37, 36, 35, 34, 33, 32, 31, 30, 29, 28, 27, 26, 25, 24, 23, 22, 21, 20, 19, 18, 17, 16, 15, 14, 13, 12, 11, 10, 9, 8, 7, 6, 5, 4, 3, 2, 1). Examples include leader sequences to direct protein trafficking, or short peptide sequences which facilitate cloning or purification (e.g. histidine tags i.e. His where n=3, 4, 5, 6, 7, 8, 9, 10 or more). Other suitable N-terminal amino acid sequences will be apparent to those skilled in the art. If X₁ lacks its own N-terminus methionine, -A- is usually an oligopeptide (e.g. with 1, 2, 3, 4, 5, 6, 7 or 8 amino acids) which provides a N-terminus methionine e.g. Met-Ala-Ser, or a single Met residue. —B— is an optional C-terminal amino acid sequence. This will typically be short (e.g. 40 or fewer amino acids i.e. 39, 38, 37, 36, 35, 34, 33, 32, 31, 30, 29, 28, 27, 26, 25, 24, 23, 22, 21, 20, 19, 18, 17, 16, 15, 14, 13, 12, 11, 10, 9, 8, 7, 6, 5, 4, 3, 2, 1). Examples include sequences to direct protein trafficking, short peptide sequences which facilitate cloning or purification (e.g. comprising histidine tags i.e. His where n=3, 4, 5, 6, 7, 8, 9, 10 or more), or sequences which enhance protein stability. Other suitable C-terminal amino acid sequences will be apparent to those skilled in the art. Where hybrid polypeptides are used, the individual polypeptides within the hybrid (i.e. individual —X— moieties) may be from one or more strains. Where n=2, for instance, X₂ may be from the same strain as X₁ or from a different strain of C. difficile. Where n=3, the strains might be (i) X₁═X₂═X₃ (ii) X₁═X₂≠X₃ (iii) X₁≠X₂═X₃ (iv) X₁≠X₂≠X₃ or (v) X₁═X₃≠X₂, etc.

[0088] Within group (c), deletions or substitutions may be at the N-terminus and/or C-terminus, or may be between the two termini. Thus a truncation is an example of a deletion. Truncations may involve deletion of up to 40 (or more) amino acids at the N-terminus and/or C-terminus. N-terminus truncation can remove leader peptides e.g. to facilitate recombinant expression in a heterologous host. C-terminus truncation can remove anchor sequences e.g. to facilitate recombinant expression in a heterologous host. According to the invention, the Xn may comprise the amino acid sequences of two or more antigens selected from the group consisting of: Dif44, Dif51, Dif130, Dif153, Dif183, Dif192, Dif208, Dif208A, Dif232, a ToxB-GT antigen and a TcdA antigen. Each Xn may be an amino acid sequence of an antigen of an antigen combination of the invention (as described above). In certain embodiments, n is 2. When n is 2, X1 is usually a ToxB-GT antigen and X [symbol] 2 is usually a TcdA antigen, but any other combination of two of the antigens as described above may also be used in accordance with the invention. When n is 3, for example, any combination of three antigens as described above may be used. When n is 4, for example, any combination of four antigens described above may be used. Generally, two or more of the Xn may be the same antigens or, when n is 2, 3, or 4, each Xn may be a different antigen. When two or more of the Xn are sequences of the same antigen, said two or more Xn may have the same polypeptide sequence or a different polypeptide sequence, e.g., may be different variants or fragments of the given antigen, as described above. Where these antigens are defined in terms of (a) having 50% or more identity (e.g. 60%, 65%, 70%, 75%, 80%, 85%, 90%, 91%, 92%, 93%, 94%, 95%, 96%, 97%, 98%, 99%, 99.5% or more) to a given sequence; and/or (b) comprising a fragment of at least ‘n’ consecutive amino acids of a given sequence, wherein ‘n’ is 7 or more (e.g. 8, 10, 12, 14, 16, 18, 20, 25, 30, 35, 40, 50, 60, 70, 80, 90, 100, 150, 200, 250 or more), the level of identity in (a) and the value of ‘n’ in (b) may be the same for each X.

[0089] Polypeptides used with the invention may comprise a sequence —P-Q- or -Q-P—, wherein: —P— is an amino acid sequence as defined above and -Q- is not a sequence as defined above i.e. may be provided as fusion proteins. Where the N-terminus codon of —P— is not ATG, but this codon is not present at the N-terminus of a polypeptide, it will be translated as the standard amino acid for that codon rather than as a Met. Where this codon is at the N-terminus of a polypeptide, however, it will be translated as Met. Examples of -Q- moieties include, but are not limited to, histidine tags (i.e. His where n=3, 4, 5, 6, 7, 8, 9, 10 or more), maltose-binding protein, or glutathione-S-transferase (GST). Expression of the polypeptides used with the invention may take place in a heterologous host for expression (recombinant expression), such as E. coli. The heterologous host may be prokaryotic (e.g. a bacterium) or eukaryotic. By way of non limiting example, other suitable hosts include Bacillus subtilis, Vibrio cholerae, Salmonella typhi, Salmonella typhimurium, Neisseria lactamica, Neisseria cinerea, Mycobacteria (e.g. M.tuberculosis), yeasts, etc. One skilled in the art will understand that it may be helpful to change codons to optimise expression efficiency in such hosts without affecting the encoded amino acids.

### Nucleic Acids

[0090] In another embodiment, the invention provides a nucleic acid which encodes an amino acid sequence selected from the group consisting of SEQ ID NOs 79, 81, 93, 105, 111, 113, 125, 133, 139, 141, 153, 165, 171, 173, 185, 187, 189, 300, 322, 357, 359, 361, 433, 435, 437, 439, 441, 443, 445, 447, 449, 451, 453, 455, 457, 459, 461, 463 and 465. SEQ ID NOS 79, 139, 133, 433, 111, 171, 113 and 173 are preferred. Particular nucleic acid sequences are SEQ ID NOs: 78, 80, 92, 104, 110, 112, 124, 132, 138, 140, 152, 164, 170, 172, 184, 186, 188, 356, 358, 360, 432, 434, 436, 438, 440, 442, 444, 446, 448, 450, 452, 454, 456, 458, 460, 462 and 464. SEQ ID NOS 78, 132, 138, 432, 110, 170, 112 and 172 are preferred.

[0091] Nucleotide sequences encoding peptides of the antigen combinations may be designed according to the genetic code. Thus, such a nucleotide sequence may encode one or more of SEQ ID NOs: 1, 2, 3, 4, 5, 6, 7, 8, 9, 10, 11, 12, 13, 14, 15, 16, 17, 18, 19, 20, 21, 22, 23, 54, 56, 58, 60, 62, 64 (e.g. encoding ToxB and TcdA molecules), or may comprise one or more of SEQ ID NOs:30, 31, 32, 33, 34, 35, 36, 37, 38, 39, 40, 41, 42, 43, 44, 45, 46, 47, 48, 49, 50, 51, 52, 53, 55, 57, 59, 61, 63, 65, 66, 67, 68, 69.

[0092] These nucleic acids are suitable for use in compositions, for instance in vaccines or other immunogenic compositions. The nucleic acids (e.g. combinations of nucleic acids, vectors, or vector combinations), encode polypeptides used with the invention, combinations of polypeptides or hybrid polypeptides used with the invention. Nucleic acids comprising a nucleotide sequence that encodes one or more (e.g., 2, 3 or 4) polypeptides or hybrid polypeptides of the antigen combinations of the invention may be used. A nucleic acid may be, e.g., a vector (e.g. a cloning or expression vector). Nucleic acids (typically DNA) encoding the polypeptides of invention, can be used to give compositions, methods and uses based on nucleic acid immunisation. Nucleic acid immunisation is now a developed field (e.g. see references 28 to 35 etc.).

[0093] Nucleic acids of the invention that may be used in compositions of the invention are SEQ ID NOs: 78, 80, 92, 104, 110, 112, 124, 132, 138, 140, 152, 164, 170, 172, 184, 186, 188, 356, 358, 360, 432, 434, 436, 438, 440, 442, 444, 446, 448, 450, 452, 454, 456, 458, 460, 462 and 464, and SEQ ID NOs: 30, 31, 32, 33, 34, 35, 36, 37, 38, 39, 40, 41, 42, 43, 44, 45, 46, 47, 48, 49, 50, 51, 52, 53, 55, 57, 59, 61, 63, 65, 66, 67, 68, 69. In addition, nucleic acids comprising nucleotide sequences having sequence identity to such nucleotide sequences may also be used in compositions of the invention. Identity between sequences is preferably determined by the Smith-Waterman homology search algorithm as described above. Such nucleic acids include those using alternative codons to encode the same amino acid. The use of alternative codons may aid expression in the mammal following vaccination.

[0094] Nucleic acids comprising nucleotide sequences having 50% or more identity (e.g. 60%, 65%, 70%, 75%, 80%, 85%, 90%, 91%, 92%, 93%, 94%, 95%, 96%, 97%, 98%, 99%, 99.5% or more, e.g. 90% identity or more, or 95% identity or more, or 99% identity or more, to any of the nucleic acids referred to may thus be used. Nucleic acids which can hybridize to the nucleic acids selected from the group comprising SEQ ID NOs: 78, 80, 92, 104, 110, 112, 124, 132, 138, 140, 152, 164, 170, 172, 184, 186, 188, 356, 358, 360, 432, 434, 436, 438, 440, 442, 444, 446, 448, 450, 452, 454, 456, 458, 460, 462 and 464, and SEQ ID NOs: 30, 31, 32, 33, 34, 35, 36, 37, 38, 39, 40, 41, 42, 43, 44, 45, 46, 47, 48, 49, 50, 51, 52, 53, 55, 57, 59, 61, 63, 65, 66, 67, 68, 69 may also be used in a composition of the invention. Hybridization reactions can be performed under conditions of different “stringency”. Conditions that increase stringency of a hybridization reaction are widely known and published in the art. Examples of relevant conditions include (in order of increasing stringency): incubation temperatures of 25° C., 37° C., 50° C., 55° C. and 68° C.; buffer concentrations of 10×SSC, 6×SSC, 1×SSC, 0.1×SSC (where SSC is 0.15 M NaCl and 15 mM citrate buffer) and their equivalents using other buffer systems; formamide concentrations of 0%, 25%, 50%, and 75%; incubation times from 5 minutes to 24 hours; 1, 2, or more washing steps; wash incubation times of 1, 2, or 15 minutes; and wash solutions of 6×SSC, 1×SSC, 0.1×SSC, or de-ionized water. Hybridization techniques and their optimization are well known in the art (e.g. see refs 36, 37, etc.]. In some embodiments, nucleic acid of the invention hybridizes to a target under low stringency conditions; in other embodiments it hybridizes under intermediate stringency conditions; in some embodiments, it hybridizes under high stringency conditions. An exemplary set of low stringency hybridization conditions is 50° C. and 10×SSC. An exemplary set of intermediate stringency hybridization conditions is 55° C. and 1×SSC. An exemplary set of high stringency hybridization conditions is 68° C. and 0.1×SSC.

[0095] In some compositions, fragments of the nucleic acid sequences described above (e.g. fragments of molecules with the specific sequences referred to in the sequence listing, or fragents of the variants defined above by reference to their ability to hybridise with, or by percentage sequence identiy with the specific sequences referred to in the sequence listing may be employed. For certain embodiments of the invention, nucleic acids are at least 7 nucleotides in length (e.g. 8, 9, 10, 11, 12, 13, 14, 15, 16, 17, 18, 19, 20, 21, 22, 23, 24, 25, 26, 27, 28, 29, 30, 31, 32, 33, 34, 35, 36, 37, 38, 39, 40, 45, 50, 55, 60, 65, 70, 75, 80, 90, 100, 110, 120, 130, 140, 150, 160, 170, 180, 190, 200, 225, 250, 275, 300 nucleotides or longer). For certain embodiments of the invention, nucleic acids are at most 500 nucleotides in length (e.g. 450, 400, 350, 300, 250, 200, 150, 140, 130, 120, 110, 100, 90, 80, 75, 70, 65, 60, 55, 50, 45, 40, 39, 38, 37, 36, 35, 34, 33, 32, 31, 30, 29, 28, 27, 26, 25, 24, 23, 22, 21, 20, 19, 18, 17, 16, 15 nucleotides or shorter). Nucleic acid fragments preferably encode epitopes of the specific sequences referred to in the sequence listing.

[0096] Nucleic acids according to the invention can take various forms (e.g. single stranded, double stranded, vectors, primers, probes, labelled etc.). Nucleic acids of the invention may be circular or branched, but will generally be linear. Unless otherwise specified or required, any embodiment of the invention that utilizes a nucleic acid may utilize both the double-stranded form and each of two complementary single-stranded forms which make up the double stranded form. Primers and probes are generally single-stranded, as are antisense nucleic acids. The term “complement” or “complementary” when used in relation to nucleic acids refers to Watson-Crick base pairing. Thus the complement of C is G, the complement of G is C, the complement of A is T (or U), and the complement of T (or U) is A. It is also possible to use bases such as I (the purine inosine) e.g. to complement pyrimidines (C or T).

[0097] Nucleic acids encoding antigens described herein can be used, for example: to produce polypeptides; as hybridization probes for the detection of nucleic acid in biological samples; to generate additional copies of the nucleic acids; to generate ribozymes or antisense oligonucleotides; as single-stranded DNA primers or probes; or as triple-strand forming oligonucleotides. The invention provides a process for producing nucleic acid encoding antigens described herein, wherein the nucleic acid is synthesised in part or in whole using chemical means. The invention provides vectors comprising nucleotide sequences encoding antigens described herein (e.g. cloning or expression vectors) and host cells transformed with such vectors.

### Nucleic Acid Immunisation

[0098] The nucleic acid encoding the polypeptide can be expressed in vivo after delivery to a mammal and the expressed polypeptide then stimulates the immune system. The active ingredient will typically take the form of a nucleic acid vector comprising: (i) a promoter; (ii) a sequence encoding the polypeptide, operably linked to the promoter; and optionally (iii) a selectable marker. In some embodiments, the vectors may further comprise (iv) an origin of replication; and (v) a transcription terminator downstream of and operably linked to (ii). In general, (i) & (v) will be eukaryotic and (iii) & (iv) will be prokaryotic. Typical promoters are viral promoters e.g. from cytomegalovirus (CMV). The vector may also include transcriptional regulatory sequences (e.g. enhancers) in addition to the promoter and which interact functionally with the promoter. Vectors may include the immediate-early CMV enhancer/promoter, and may also include CMV intron A. The promoter is operably linked to a downstream sequence encoding a polypeptide, such that expression of the polypeptide-encoding sequence is under the promoter's control. Where a marker is used, it typically functions in a microbial host (e.g. in a prokaryote, in a bacteria, in a yeast). The marker is often a prokaryotic selectable marker (e.g. transcribed under the control of a prokaryotic promoter). For convenience, typical markers are antibiotic resistance genes. The vector is typically an autonomously replicating episomal or extrachromosomal vector, such as a plasmid. The vector usually comprises an origin of replication. Often the origin of replication is active in prokaryotes but not in eukaryotes. Vectors thus can include a prokaryotic marker for selection of the vector, a prokaryotic origin of replication, but a eukaryotic promoter for driving transcription of the polypeptide-encoding sequence. The vectors will therefore (a) be amplified and selected in prokaryotic hosts without polypeptide expression, but (b) be expressed in eukaryotic hosts without being amplified. This arrangement is ideal for nucleic acid immunization vectors. The vector may comprise a eukaryotic transcriptional terminator sequence downstream of the coding sequence. This can enhance transcription levels. Where the coding sequence does not have its own, the vector can comprise a polyadenylation sequence, for example the polyadenylation sequence from bovine growth hormone. The vector may comprise a multiple cloning site. In addition to sequences encoding the polypeptide and a marker, the vector may comprise a second eukaryotic coding sequence. The vector may also comprise an IRES (Internal Ribosome Entry Site) upstream of said second sequence in order to permit translation of a second eukaryotic polypeptide from the same transcript as the polypeptide. Alternatively, the polypeptide-coding sequence may be downstream of an IRES. The vector may comprise unmethylated CpG motifs e.g. unmethylated DNA sequences which have in common a cytosine preceding a guanosine, flanked by two 5′ purines and two 3′ pyrimidines. In their unmethylated form these DNA motifs have been demonstrated to be potent stimulators of several types of immune cell. Vectors may be delivered in a targeted way. Receptor-mediated DNA delivery techniques are described in, for example, references 38 to 43. Therapeutic compositions containing a nucleic acid are administered in a range of about 100 ng to about 200 mg of DNA for local administration in a gene therapy protocol. Concentration ranges of about 500 ng to about 50 mg, about 1 μg to about 2 mg, about 5 μg to about 500 μg, and about 20 μg to about 100 μg of DNA can also be used during a gene therapy protocol. Factors such as method of action (e.g. for enhancing or inhibiting levels of the encoded gene product) and efficacy of transformation and expression are considerations which will affect the dosage required for ultimate efficacy. Where greater expression is desired over a larger area of tissue, larger amounts of vector or the same amounts re-administered in a successive protocol of administrations, or several administrations to different adjacent or close tissue portions may be required to effect a positive therapeutic outcome. In all cases, routine experimentation in clinical trials will determine specific ranges for optimal therapeutic effect. Vectors can be delivered using gene delivery vehicles. The gene delivery vehicle can be of viral or non-viral origin (see generally references 44 to 47). Viral-based vectors for delivery of a desired nucleic acid and expression in a desired cell are well known in the art. Exemplary viral-based vehicles include, but are not limited to, recombinant retroviruses (e.g. references 48 to 58), alphavirus-based vectors (e.g. Sindbis virus vectors, Semliki forest virus (ATCC VR-67; ATCC VR-1247), Ross River virus (ATCC VR-373; ATCC VR-1246) and Venezuelan equine encephalitis virus (ATCC VR-923; ATCC VR-1250; ATCC VR 1249; ATCC VR-532); hybrids or chimeras of these viruses may also be used), poxvirus vectors (e.g. vaccinia, fowlpox, canarypox, modified vaccinia Ankara, etc.), adenovirus vectors, and adeno-associated virus (AAV) vectors (e.g. see refs. 59 to 64). Administration of DNA linked to killed adenovirus [65] can also be employed.

[0099] Non-viral delivery vehicles and methods can also be employed, including, but not limited to, polycationic condensed DNA linked or unlinked to killed adenovirus alone [e.g. 65], ligand-linked DNA [66], eukaryotic cell delivery vehicles cells [e.g. refs. 67 to 71] and nucleic charge neutralization or fusion with cell membranes. Naked DNA can also be employed. Exemplary naked DNA introduction methods are described in refs. 72 and 73. Liposomes (e.g. immunoliposomes) that can act as gene delivery vehicles are described in refs. 74 to 78. Additional approaches are described in references 79 & 80. Further non-viral delivery suitable for use includes mechanical delivery systems such as the approach described in ref. 80. Moreover, the coding sequence and the product of expression of such can be delivered through deposition of photopolymerized hydrogel materials or use of ionizing radiation [e.g. refs. 81 & 82]. Other conventional methods for gene delivery that can be used for delivery of the coding sequence include, for example, use of hand-held gene transfer particle gun [83] or use of ionizing radiation for activating transferred genes [81 & 82]. Delivery of DNA using PLG {poly(lactide-co-glycolide)} microparticles is a particularly preferred method e.g. by adsorption to the microparticles, which are optionally treated to have a negatively-charged surface (e.g. treated with SDS) or a positively-charged surface (e.g. treated with a cationic detergent, such as CTAB).

[0100] Nucleic acids are typically provided in purified or substantially purified form i.e. substantially free from other nucleic acids (e.g. free from naturally-occurring nucleic acids), particularly from other C. difficile or host cell nucleic acids, generally being at least about 50% pure (by weight), and usually at least about 90% pure. Nucleic acids for use in the invention may be prepared in many ways e.g. by chemical synthesis (e.g. phosphoramidite synthesis of DNA) in whole or in part, by digesting longer nucleic acids using nucleases (e.g. restriction enzymes), by joining shorter nucleic acids or nucleotides (e.g. using ligases or polymerases), from genomic or cDNA libraries, etc. The term “nucleic acid” includes in general means a polymeric form of nucleotides of any length, which contain deoxyribonucleotides, ribonucleotides, and/or their analogs. It includes DNA, RNA, DNA/RNA hybrids. It also includes DNA or RNA analogs, such as those containing modified backbones (e.g. peptide nucleic acids (PNAs) or phosphorothioates) or modified bases. Thus the invention includes mRNA, tRNA, rRNA, ribozymes, DNA, cDNA, recombinant nucleic acids, branched nucleic acids, plasmids, vectors, probes, primers, etc. Where nucleic acid of the invention takes the form of RNA, it may or may not have a 5′ cap.

[0101] Nucleic acids may be part of a vector i.e. part of a nucleic acid construct designed for transduction/transfection of one or more cell types. Vectors may be, for example, “cloning vectors” which are designed for isolation, propagation and replication of inserted nucleotides, “expression vectors” which are designed for expression of a nucleotide sequence in a host cell, “viral vectors” which is designed to result in the production of a recombinant virus or virus-like particle, or “shuttle vectors”, which comprise the attributes of more than one type of vector. Typical vectors are plasmids. A “host cell” includes an individual cell or cell culture which can be or has been a recipient of exogenous nucleic acid. Host cells include progeny of a single host cell, and the progeny may not necessarily be completely identical (in morphology or in total DNA complement) to the original parent cell due to natural, accidental, or deliberate mutation and/or change. Host cells include cells transfected or infected in vivo or in vitro with nucleic acid of the invention.

[0102] Where a nucleic acid is DNA, it will be appreciated that “U” in a RNA sequence will be replaced by “T” in the DNA. Similarly, where a nucleic acid is RNA, it will be appreciated that “T” in a DNA sequence will be replaced by “U” in the RNA. The term “complement” or “complementary” when used in relation to nucleic acids refers to Watson-Crick base pairing. Thus the complement of C is G, the complement of G is C, the complement of A is T (or U), and the complement of T (or U) is A. It is also possible to use bases such as I (the purine inosine) e.g. to complement pyrimidines (C or T).

### Antibodies

[0103] In another embodiment, there is provided an antibody capable of binding to a polypeptide encoded by an amino acid sequence selected from the group consisting of SEQ ID NOs 1, 2, 3, 4, 5, 6, 7, 8, 9, 10, 11, 12, 13, 14, 15, 16, 17, 18, 19, 20, 21, 22, 23, 54, 56, 58, 60, 62, 64, 79, 81, 93, 105, 111, 113, 125, 133, 139, 141, 153, 165, 171, 173, 185, 187, 189, 300, 322, 357, 359, 361, 433, 435, 437, 439, 441, 443, 445, 447, 449, 451, 453, 455, 457, 459, 461, 463 and 465. More preferably the group consists of SEQ ID NOS 79, 139, 133, 433, 111, 171, 113 and 173.

[0104] The antibodies referred to herein are capable of binding to a polypeptide useful in the invention and thus include antibodies that bind to polypeptides which are variants and/or fragments of the sequences recited above, as discussed elsewhere. Particularly an antibody capable of binding to a polypeptide of the invention is a neutralising antibody. The term neutralising antibody refers to an antibody that can bind to a particular protein, polypeptide or infectious body thereby negating or reducing the effect of said protein, polypeptide or infectious body. More particularly, a neutralising antibody is any antibody that can neutralise or reduce the ability of that pathogen to initiate and/or perpetuate an infection in a host, for example by reducing or limiting growth, tissue attachment, spread, tissue damage and the like.

[0105] Antibodies against the C. difficile polypeptides of the invention can be used for passive immunisation in the methods discussed above. Thus the invention provides a composition comprising at least one antibody which is capable of binding a polypeptide comprising the amino acid sequences disclosed herein. Combinations of antibodies according to the invention are provided for simultaneous, separate or sequential administration. The invention also provides and immunogenic and pharmaceutical compositions comprising such antibodies. Herein, in the context of the invention, the term “antibody” or “antibodies” comprises the combinations of antibodies of the invention. In particular, the invention provides a combination of antibodies comprising: (a) one or more antibodies selected from the group consisting of an antibody which recognises a Dif44 antigen, a Dif51 antigen, a Dif130 antigen, a Dif153 antigen, a Dif183 antigen, a Dif192 antigen, a Dif208 antigen, a Dif208A antigen and a Dif232 antigen, preferably a Diff44 or Dif208 antigen (b) an antibody which recognises a ToxB-GT antigen and (c) an antibody which recognises a TcdA antigen (preferably ToxA_p5_{—}6). The combination may be present in a composition.

[0106] Compositions, comprising antibodies may be used in therapy. The invention also provides the use of antibodies of the invention in medicine and in therapy, e.g. for passive immunisation against CDAD. The invention also provides the use of such antibodies in the manufacture of a medicament. The invention also provides a method for treating a mammal comprising the step of administering an effective amount of an antibody of the invention. As described above for compositions, these methods and uses allow a mammal to be protected against C. difficile infection. In particular, antibodies of the invention may be used in methods of treating or preventing infections by C. difficile, comprising the step of administering to the mammal an effective amount of a combination of antibodies as described herein, or a composition comprising such a combination. In these methods, the at least two (e.g. 2, 3, or 4) antibodies of the invention may be administered simultaneously, separately or sequentially.

[0107] Antibodies of the invention will typically bind specifically to a polypeptide from C. difficile e.g. with an affinity of 1 μM, 100 nM, 10 nM, 1 nM, 100 μM or tighter. The term “antibody” includes intact immunoglobulin molecules, as well as fragments thereof which are capable of binding a polypeptide. These include hybrid (chimeric) antibody molecules [84, 85]; F(ab′)2 and F(ab) fragments and Fv molecules; non-covalent heterodimers [86, 87]; single-chain Fv molecules (sFv) [88]; dimeric and trimeric antibody fragment constructs; minibodies [89, 90]; humanized antibody molecules [91-93]; and any functional fragments obtained from such molecules, as well as antibodies obtained through non-conventional processes such as phage display. In some embodiments, the antibodies are monoclonal antibodies. Methods of obtaining monoclonal antibodies are well known in the art. In some embodiments the antibodies are humanised or fully-human antibodies.

[0108] The invention also provides compositions comprising combinations of antibodies of the invention. For example, compositions are provided comprising a combination of different antibodies which are specific for at least three (i.e. 3, 4, 5, 6, 7, 8, 9, 10, 11 or 12) C. difficile antigens according to the antigen combinations of the invention, including variants and immunogenic fragments of any of said antigens, as well as a process for preparing a mixture of a combination of antibodies of the invention, said process comprising a step of mixing antibodies of any of the combinations of antibodies as defined above. For example, the invention provides a process comprising a step of mixing at least two (i.e. 2, 3, or 4) antibodies selected from antibodies which recognise the C. difficile polypeptides of the invention and/or an epitope thereof. A process according to the invention for preparing a mixture of antibodies may comprise a further step of formulating the mixture as a medicament. Such processes may further comprise a step of packaging the formulation for storage or distribution as a medicament.

### Antibiotics

[0109] In certain situations, such as during or following treatment with or administration of antibiotics, the natural balance of the gut flora is disturbed. As a result C. difficile can become more prevalent leading to symptoms of infection. Thus, the compositions of the invention may be used in conjunction with antibiotics to treat the underlying condition and simultaneously prevent or treat any C. difficile infection.

[0110] In one embodiment, the methods comprise administering an effective amount of a composition of the invention followed by administering antibiotics. In an alternative, the method comprises administering antibiotics followed by administering a composition of the invention. In a further alternative, the method comprises administering antibiotics concurrently with administering a composition of the invention. Thus the antibiotic and the effective amount of one or more polypeptides may be administered sequentially, or separately. Typically the antibiotic used in these methods will be one which is suitable for treating the underlying infection, but which is known to be associated with C. difficile AAD. Though any antibiotic can cause antibiotic-associated diarrhoea, or one of the more severe C. difficile infection associated conditions, the most common causative agents are ampicillin, clindamycin, cephalosporins such as cefpodoxime, and all fluoroquinolones. These methods are thus particularly suited to treatment regimes incorporating an antibiotic known in the art to be frequently linked to C. difficile AAD. In some embodiments, therefore, a composition of the invention may further comprise an antibiotic, such as an antibiotic listed above.

### Compositions and Medicaments

[0111] In another embodiment, the invention provides a composition comprising: (a) one or more polypeptides comprising an amino acid sequence selected from the group consisting of SEQ ID NOs 71, 73, 75, 77, 79, 81, 83, 85, 87, 89, 91, 93, 95, 97, 99, 101, 103, 105, 107, 109, 111, 113, 115, 117, 119, 121, 123, 125, 127, 129, 131, 133, 135, 137, 139, 141, 143, 145, 147, 149, 151, 153, 155, 157, 159, 161, 163, 165, 167, 169, 171, 173, 175, 177, 179, 181, 183, 185, 187 189, 190, 191, 193, 195, 260, 262, 264, 266, 268, 270, 272, 274, 284, 286, 288, 290, 292, 294, 296, 298, 300, 302, 304, 306, 308, 310, 312, 314, 316, 318, 320, 322, 324, 326, 328, 330, 331, 357, 359, 361, 427, 429, 431, 433, 435, 437, 439, 441, 443, 445, 447, 449, 451, 453, 455, 457; and/or

(b) one or more nucleic acids which encode(s) an amino acid sequence selected from the group recited in (a), or one or more nucleic acid sequences wherein the nucleic acid sequence is selected from the group consisting of SEQ ID NOs:70, 72, 74, 88, 90, 92, 94, 96, 98, 100, 102, 104, 106, 108, 110, 112, 114, 116, 118, 120, 122, 124, 126, 128, 130, 132, 134, 136, 138, 140, 142, 144, 146, 148, 150, 152, 154, 156, 158, 160, 162, 164, 166, 168, 170, 172, 174, 176, 178, 180, 182, 184, 186, 188, 192, 194, 259, 261, 263, 275, 267, 269, 271, 273, 283, 285, 287, 289, 291, 293, 295, 297, 299, 301, 303, 305, 307, 309, 311, 313, 315, 317, 319, 321, 323, 325, 327, 329, 356, 358, 360, 426, 428, 430, 432, 434, 436, 438, 440, 442, 444, 446, 448, 450, 452, 454, 456, 458, 460, 462 and 464 and/or
(c) one of more antibodies capable of binding to a polypeptide comprising an amino acid sequence selected from the group recited in (a) or one of more antibodies capable of binding to a polypeptide comprising an amino acid sequence selected from the group recited in (a) wherein the antibody is a neutralising antibody.

[0112] In all cases, molecules with sequences SEQ ID NOs 79, 81, 93, 105, 111, 113, 125, 133, 139, 141, 153, 165, 171, 173, 185, 187, 189, 300, 322, 357, 359, 361, 433, 435, 437, 439, 441, 443, 445, 447, 449, 451, 453, 455, 457, 459, 461, 463 and 465 or encoding or binding to molecules with these sequences are preferred, and particularly preferred are molecules with sequences SEQ ID NOs 79, 139, 133, 433, 111, 171, 113 and 173, or encoding or binding to molecules with these sequences.

[0113] In a further embodiment the composition of the invention comprises at least one pharmaceutical carrier(s) and/or excipients. Particularly the composition of the invention is a pharmaceutical or vaccine composition.

[0114] In another embodiment, the invention provides a composition comprising a combination of polypeptides comprising, consisting essentially of or consisting of at least one polypeptides selected from the group consisting of SEQ ID NOs 71, 73, 75, 77, 79, 81, 83, 85, 87, 89, 91, 93, 95, 97, 99, 101, 103, 105, 107, 109, 111, 113, 115, 117, 119, 121, 123, 125, 127, 129, 131, 133, 135, 137, 139, 141, 143, 145, 147, 149, 151, 153, 155, 157, 159, 161, 163, 165, 167, 169, 171, 173, 175, 177, 179, 181, 183, 185, 187 189, 190, 191, 193, 195, 260, 262, 264, 266, 268, 270, 272, 274, 284, 286, 288, 290, 292, 294, 296, 298, 300, 302, 304, 306, 308, 310, 312, 314, 316, 318, 320, 322, 324, 326, 328, 330, 331, 357, 359, 361, 427, 429, 431, 433, 435, 437, 439, 441, 443, 445, 447, 449, 451, 453, 455, 457, 459, 461, 463 and 465. Particularly such compositions comprising a combination of polypeptides comprising, consisting essentially of or consisting of two or more (i.e. 2, 3 or more) amino acid sequences selected from the group recited above. Particularly preferred compositions may comprise a combination of polypeptides comprising, consisting essentially of or consisting of at least one polypeptide selected from the group consisting of SEQ ID NO: 79, 81, 93, 105, 111, 113, 125, 133, 139, 141, 153, 165, 171, 173, 185, 187, 189, 300, 322, 357, 359, 361, 433, 435, 437, 439, 441, 443, 445, 447, 449, 451, 453, 455, 457, 459, 461, 463 and 465, or the group consisting of SEQ ID NOS 79, 139, 133, 433, 111, 171, 113 and 173. Particulary such preferred composition may comprise a combination of polypeptides comprising, consisting essentially of or consisting of two or more (i.e. 2, 3 or more) amino acid sequences selected from the group consisting of SEQ ID NOs 79, 81, 93, 105, 111, 113, 125, 133, 139, 141, 153, 165, 171, 173, 185, 187, 189, 300, 322, 357, 359, 361, 433, 435, 437, 439, 441, 443, 445, 447, 449, 451, 453, 455, 457, 459, 461, 463 and 465 or the group consisting of SEQ ID NOS 79, 139, 133, 433, 111, 171, 113 and 173.

[0115] Preferred compositions of the invention may comprise, consist essentially of or consist of a combination of at least one amino acid sequences encoding at least one polypeptide selected from the group consisting of Dif44 (CD0844), Dif51 (CD0999), Dif130 (CD2645), Dif192 (CD1035), Dif183 (CD3669), DIF153 (CD2830), Dif232 (CD1031), Dif208 (CD2831), and Dif208A. Particularly such preferred compositions comprise a combination of C. difficile polypeptides, more particularly comprising, consisting essentially of or consisting of two or more (i.e. 2, 3, 4) polypeptides selected from the group consisting of Dif44 (CD0844), Dif51 (CD0999), Dif130 (CD2645), Dif192 (CD1035), Dif183 (CD3669), DIF153 (CD2830), Dif232 (CD1031), Dif208 (CD2831), and Dif208A. Especially preferred are Dif44 (CD0844) and Dif208 (CD2831).

[0116] Particular compositions of the invention may comprise, consist essentially of or consist of a combination of: Polypeptide DIF44 (CD0844) and polypeptide DIF192 (CD1035); and/or Polypeptide DIF51 (CD0999) and polypeptide DIF130 (CD2645); and/or Polypeptide DIF232 (CD1031) and polypeptide DIF208 (CD2831); and/or Polypeptide Dif183 (CD3669) and polypeptide DIF225 (CD0438); and/or Polypeptide DIF44 (CD0844) and polypeptide DIF51 (CD0999); and/or Polypeptide DIF130 (CD2645) and polypeptide DIF192 (CD1035); and/or Polypeptide Dif183 (CD3669) and polypeptide DIF153 (CD2830); and/or Polypeptide DIF232 (CD1031) and polypeptide DIF208A (CD2831). Polypeptides Dif44 (CD0844), Dif51 (CD0999), Dif130 (CD2645) and/or Dif192 (CD1035); and/or Polypeptides Dif183 (CD3669), DIF153 (CD2830), Dif232 (CD1031), and/or Dif208 (CD2831); and/or Polypeptides Dif183 (CD3669), DIF153 (CD2830), Dif232 (CD1031), and/or Dif208A (CD2831); and/or Polypeptides DIF44 (CD0844), DIF153 (CD2830), and/or Dif208 (CD2831); and/or Polypeptides DIF44 (CD0844), DIF153 (CD2830), and/or Dif208A (CD2831); and/or Polypeptides Dif51 (CD0999), Dif130 (CD2645), Dif183 (CD3669), DIF192 (CD1035), and/or DIF232 (CD1031); and/or Polypeptide DIF44 (CD0844) and one or more (e.g. 2, 3, 4, 5, 6, 7) or at least 1, 2, 3, 4, 5 or 6 of polypeptides DIF51 (CD0999), DIF130 (CD2645), DIF153 (CD2830), DIF192 (CD1035), DIF208 (CD2831), Dif183 (CD3669) and DIF232 (CD1031), e.g. polypeptide DIF44 and one or more (e.g. 2, 3, 4) or at least 1, 2 or 3 of polypeptides DIF153, DIF192, DIF208, Dif183 and Dif232, e.g. DIF44 and DIF153, DIF44 and DIF192, DIF 44 and DIF208, DIF 44 and Dif183, DIF 44 and DIF232; and/or polypeptide DIF208 (CD2831) and one or more (e.g. 2, 3, 4, 5, 6, 7) or at least 1, 2, 3, 4, 5 or 6 of polypeptides DIF 44 (CD0844), DIF51 (CD0999), DIF130 (CD2645), DIF153 (CD2830), DIF192 (CD1035), Dif183 (CD3669) and DIF232 (CD1031), e.g. polypeptide DIF208 and one or more (e.g. 2, 3, 4) or at least 1, 2 or 3 of polypeptides DIF44, DIF153, DIF192, Dif183 and Dif232, e.g. DIF208 and DIF153, DIF208 and DIF192, DIF208 and Dif183, DIF208 and DIF232; and/or polypeptides DIF44 (CD0844), Dif208 (CD2831), and one or more (e.g. 2, 3, 4, 5, 6) or at least 1, 2, 3, 4 or 5 of DIF51 (CD0999), DIF130 (CD2645), DIF153 (CD2830), DIF192 (CD1035), Dif183 (CD3669) and DIF232 (CD1031), e.g. polypeptides DIF44 (CD0844), Dif208 (CD2831), and one or more (e.g. 2 or 3 or 4) or at least 1 or 2 or 3 of polypeptides DIF153, DIF192, Dif183 and Dif232.

[0117] Equivalent combinations or compositions may be made using encoding nucleic acid molecules, and/or antibodies to the recited molecules, such that a combination of nucleic acid molecules encoding the peptide combination referred to can be used, as can a combination of antibodies to the recited molecules in the composition of the invention. Particularly compositions of the invention are immunogenic compositions.

[0118] All of the above compositions and combinations of the invention, as discussed above, may additionally comprise one or more additional antigens, e.g. which provide a protective effect against C. difficile, or against CDAD, molecules which encode such antigens or molecules (e.g. antibodies) that bind to such antigens. The relevant molecules as well as the sequences for these molecules are provided elsewhere herein.

[0119] As such, a preferred composition of the invention may comprise, consist essentially of or consist of a combination of: ToxB-GT and TdcA and at least one polypeptide selected from the group consisting of Dif44 (CD0844), Dif51 (CD0999), Dif130 (CD2645), Dif192 (CD1035), Dif183 (CD3669), DIF153 (CD2830), Dif232 (CD1031) and Dif208 (CD2831), e.g. two or more (i.e. 2, 3, 4) polypeptides selected from the group consisting of Dif44 (CD0844), Dif51 (CD0999), Dif130 (CD2645), Dif192 (CD1035), Dif183 (CD3669), DIF153 (CD2830), Dif232 (CD1031) and Dif208 (CD2831).

[0120] All of the above recited combinations of DIF44, DIF51, DIF130, DIF153, DIF192, DIF208, Dif183 and/or DIF232 polypeptides can also be made in combination additionally with ToxB-GT and TcdA, as discussed and defined above. TcdA is selected from ToxA-B, ToxA-PTA2, ToxA-P5-7, ToxA-P5-6, ToxA-P9-10, ToxA-B2, ToxA-B3, ToxA-B5, ToxA-B6 and/or ToxA-B7, and preferred combinations are combinations where TcdA is ToxA-P5-6. Most preferable combinations are (i) ToxB-GT, ToxA-P5-6 and DIF44, (ii) ToxB-GT, ToxA-P5-6 and DIF208, (iii) ToxB-GT, ToxA-P5-6, DIF44 and DI F208.

[0121] Examples of such combinations include the following combinations of antigens:

Tox-GT+TdcA+Dif208; Tox-GT+TdcA+Dif208A; Tox-GT+TdcA+Dif51; Tox-GT+TdcA+Dif44; Tox-GT+TdcA+Dif130; Tox-GT+TdcA+Dif192; Tox-GT+TdcA+Dif183; Tox-GT+TdcA+Dif153; Tox-GT+TdcA+Dif232.

[0122] Thus the invention also provides the following combinations of antigens or of antibodies including antibodies that recognise any of the following combinations of antigens: Tox-GT+TdcA+Polypeptide DIF44 (CD0844) and polypeptide DIF192 (CD1035); and/or Tox-GT+TdcA+Polypeptide DIF51 (CD0999) and polypeptide DIF130 (CD2645); and/or Tox-GT+TdcA+Polypeptide DIF232 (CD1031) and polypeptide DIF208 (CD2831); and/or Tox-GT+TdcA+Polypeptide Dif183 (CD3669) and polypeptide DIF225 (CD0438); and/or Tox-GT+TdcA+Polypeptide DIF44 (CD0844) and polypeptide DIF51 (CD0999); and/or Tox-GT+TdcA+Polypeptide DIF130 (CD2645) and polypeptide DIF192 (CD1035); and/or Tox-GT+TdcA+Polypeptide Dif183 (CD3669) and polypeptide DIF153 (CD2830); and/or Tox-GT+TdcA+Polypeptide DIF232 (CD1031) and polypeptide DIF208A (CD2831); and/or Tox-GT+TdcA+Polypeptides Dif44 (CD0844), Dif51 (CD0999), Dif130 (CD2645) and/or Dif192 (CD1035); and/or Tox-GT+TdcA+Polypeptides Dif183 (CD3669), DIF153 (CD2830), Dif232 (CD1031), and/or Dif208 (CD2831); and/or Tox-GT+TdcA+Polypeptides Dif183 (CD3669), DIF153 (CD2830), Dif232 (CD1031), and/or Dif208A (CD2831); and/or Tox-GT+TdcA+Polypeptides DIF44 (CD0844), DIF153 (CD2830), and/or Dif208 (CD2831); and/or Tox-GT+TdcA+Polypeptides DIF44 (CD0844), DIF153 (CD2830), and/or Dif208A (CD2831); Tox-GT+TdcA+Polypeptides Dif51 (CD0999), Dif130 (CD2645), Dif183 (CD3669), DIF192 (CD1035), and/or DIF232 (CD1031).

[0123] TdcA is selected from ToxA-B, ToxA-PTA2, ToxA-P5-7, ToxA-P5-6, ToxA-P9-10, ToxA-B2, ToxA-B3, ToxA-B5, ToxA-B6 and/or ToxA-B7. For example the invention also provides the following combinations of antigens or of antibodies including antibodies that recognise any of the following combinations of antigens: Tox-GT+ToxA-P5-6+Polypeptide DIF44 (CD0844) and polypeptide DIF192 (CD1035); and/or Tox-GT+ToxA-P5-6+Polypeptide DIF51 (CD0999) and polypeptide DIF130 (CD2645); and/or Tox-GT+ToxA-P5-6+Polypeptide DIF232 (CD1031) and polypeptide DIF208 (CD2831); and/or Tox-GT+ToxA-P5-6+Polypeptide Dif183 (CD3669) and polypeptide DIF225 (CD0438); and/or Tox-GT+ToxA-P5-6+Polypeptide DIF44 (CD0844) and polypeptide DIF51 (CD0999); and/or Tox-GT+ToxA-P5-6+Polypeptide DIF130 (CD2645) and polypeptide DIF192 (CD1035); and/or Tox-GT+ToxA-P5-6+Polypeptide Dif183 (CD3669) and polypeptide DIF153 (CD2830); and/or Tox-GT+ToxA-P5-6+Polypeptide DIF232 (CD1031) and polypeptide DIF208A (CD2831); and/or Tox-GT+ToxA-P5-6+Polypeptides Dif44 (CD0844), Dif51 (CD0999), Dif130 (CD2645) and/or Dif192 (CD1035); and/or Tox-GT+ToxA-P5-6+Polypeptides Dif183 (CD3669), DIF153 (CD2830), Dif232 (CD1031), and/or Dif208 (CD2831); and/or Tox-GT+ToxA-P5-6+Polypeptides Dif183 (CD3669), DIF153 (CD2830), Dif232 (CD1031), and/or Dif208A (CD2831); and/or Tox-GT+ToxA-P5-6+Polypeptides DIF44 (CD0844), DIF153 (CD2830), and/or Dif208 (CD2831); and/or Tox-GT+ToxA-P5-6+Polypeptides DIF44 (CD0844), DIF153 (CD2830), and/or Dif208A (CD2831); and/or Tox-GT+ToxA-P5-6+Polypeptides Dif51 (CD0999), Dif130 (CD2645), Dif183 (CD3669), DIF192 (CD1035), and/or DIF232 (CD1031).

[0124] Tox-GT+TcdA (preferably ToxA-P5-6) can also be combined with: Polypeptide DIF44 (CD0844) and one or more (e.g. 2, 3, 4, 5, 6, 7) or at least 1, 2, 3, 4, 5 or 6 of polypeptides DIF51 (CD0999), DIF130 (CD2645), DIF153 (CD2830), DIF192 (CD1035), DIF208 (CD2831), Dif183 (CD3669) and DIF232 (CD1031), e.g. polypeptide DIF44 and one or more (e.g. 2, 3, 4) or at least 1, 2 or 3 of polypeptides DIF153, DIF192, DIF208, Dif183, DIF232 e.g. DIF44 and DIF153, DIF44 and DIF192, DIF 44 and DIF208, DIF 44 and Dif183, DIF 44 and DIF232; and/or polypeptide DIF208 (CD2831) and one or more (e.g. 2, 3, 4, 5, 6, 7) or at least 1, 2, 3, 4, 5 or 6 of polypeptides DIF 44 (CD0844), DIF51 (CD0999), DIF130 (CD2645), DIF153 (CD2830), DIF192 (CD1035), Dif183 (CD3669) and DIF232 (CD1031), e.g. polypeptide DIF208 and one or more (e.g. 2, 3, 4) or at least 1, 2 or 3 of polypeptides DIF44, DIF153, DIF192, Dif183, e.g. DIF208 and DIF153, DIF208 and DIF192, DIF208 and Dif183, DIF208 and DIF232; and/or polypeptides DIF44 (CD0844), Dif208 (CD2831), and one or more (e.g. 2, 3, 4, 5, 6) or at least 1, 2, 3, 4 or 5 of DIF51 (CD0999), DIF130 (CD2645), DIF153 (CD2830), DIF192 (CD1035), Dif183 (CD3669) and DIF232 (CD1031), e.g. polypeptides DIF44 (CD0844), Dif208 (CD2831), and one or more (e.g. 2 or 3 or 4) or at least 1 or 2 or 3 of polypeptides DIF153, DIF192, Dif183, DIF232.

[0125] Equivalent combinations or compositions may be made using encoding nucleic acid molecules, and/or antibodies that bind to the recited molecules (e.g. that recognise any of the combinations of antigens), such that a combination of nucleic acid molecules encoding the peptide combination referred to can be used, as can a combination of antibodies that bind to the recited molecules (e.g. that recognise any of the combinations of antigens). Immunogenic compositions will in general comprise at least one antigenic protein or antigen. Where DIF208 is referred to, this could be substituted with DIF208A or DIF208B in these combinations.

[0126] The compositions of the invention may be used in methods for preventing or treating a C. difficile infection. The invention thus provides a method for raising an immune response in a mammal comprising the step of administering an effective amount of a composition of the invention comprising one or more of the polypeptides described above. The immune response is typically protective and involves antibodies and/or cell-mediated immunity. The invention also provides a method for preventing or treating a C. difficile infection in a mammal comprising the step of administering an effective amount of a composition of the invention. The methods may raise a booster response.

[0127] One of the major causes of C. difficile infection is use of antibiotics that disturb the gut flora. Therefore compositions of the invention may be used in treatment regimes with antibiotics to treat both the underlying condition and also to treat or prevent any C. difficile invention. By use of these compositions and methods, the mammal can be protected against C. difficile infection, particularly a nosocomial infection. In some embodiments the C. difficile infection results in one or more of diarrhoea, antibiotic associated diarrhoea (AAD), abdominal pain, fever, leukocytosis, pseudomembranous colitis or toxic megacolon, and said treatment may prevent, reduce or eliminate one or more of these.

[0128] In some embodiments, the compositions of the invention are compositions for use in medicine and in therapy, .e.g. for passive immunisation against CDAD. The invention also provides the use of such antibodies or compositions in the manufacture of a medicament, preferably for any of the types of treatment referred to herein.

[0129] In a further embodiment, the compositions of the invention are compositions for use in preventing or treating a C. difficile infection in a mammal.

[0130] In some embodiments, the invention also provides the use of polypeptides, nucleic acids and antibodies of the invention in the manufacture of a medicament, preferably for any of the types of treatment referred to herein.

[0131] When said immunogenic compositions prevent, ameliorate, palliate or eliminate disease from an animal then the immunogenic composition may optionally be referred to as a vaccine. The term “vaccine” as used herein refers to a vaccine composition that comprises either purified antigenic determinants, nucleic acids encoding the purified antigenic determinants or fragments thereof, in the absence of the disease-causing organism. Such vaccines may also be referred to as a “sub-unit vaccine”. The terms are not intended to encompass “whole-cell vaccines”, for example those derived from whole bacterial cells that have been killed and which may contain the antigenic determinants in un-purified form as part of a complex and uncharacterised composition. Thus, in particular embodiments whole-cell vaccines may be excluded or are disclaimed. As used herein, the term “multivalent”, means that the vaccine contains structurally similar or ‘related’ antigenic determinants from at least two strains or isolates, the antigenic determinants being homologues having minor differences between their amino acid sequences.

[0132] Thus, compositions of the invention may be useful as vaccines. Vaccines according to the invention may either be prophylactic (i.e. to prevent infection) or therapeutic (i.e. to treat infection), but will typically be prophylactic. The term “protected against infection” means that the immune system of a subject has been primed (e.g. by vaccination) to trigger an immune response and repel the infection. It will be clear to those skilled in the art that a vaccinated subject may thus get infected, but is better able to repel the infection than a control subject. The term “treating” includes both therapeutic treatment and prophylactic or preventative treatment, wherein the object is to prevent or lessen infection. For example, treating may include directly affecting or curing, suppressing, inhibiting, preventing, reducing the severity of, delaying the onset of, reducing symptoms associated with, for example, infection, or a combination thereof. “Preventing” may refer, inter alia, to delaying the onset of symptoms, preventing relapse to a disease, and the like. Treating may also include “suppressing” or “inhibiting” an infection or illness, for example reducing severity, number, incidence or latency of symptoms, ameliorating symptoms, reducing secondary symptoms, reducing secondary infections, prolonging patient survival, or combinations thereof.

[0133] The term “antigen” refers to a molecule against which a subject can initiate a humoral and/or cellular immune response. An “immunological response” to a composition or vaccine is the development in the host of a cellular and/or antibody-mediated immune response to a composition or vaccine of interest. Usually, an “immunological response” includes but is not limited to one or more of the following effects: the production of antibodies, B cells, helper T cells, and/or cytotoxic T cells, directed specifically to an antigen or antigens included in the composition or vaccine of interest. Preferably, the subject will display either a therapeutic or protective immunological response such that resistance to new infection will be enhanced and/or the clinical severity of the disease reduced. Such protection will be demonstrated by either a reduction or lack of symptoms normally displayed by an infected subject, a quicker recovery time and/or a lowered viral titre in the infected host. The term “immunogenic” protein or polypeptide as used herein also refers to an amino acid sequence which elicits an immunological response as described above.

[0134] Compositions may thus be pharmaceutically acceptable. They will usually include components in addition to the antigens e.g. they typically include one or more pharmaceutical carrier(s) and/or excipient(s). A thorough discussion of such components is available in [94]. Compositions may be administered to a mammal in aqueous form. Prior to administration, however, the composition may have been in a non-aqueous form. For instance, although some vaccines are manufactured in aqueous form, then filled and distributed and administered also in aqueous form, other vaccines are lyophilised during manufacture and are reconstituted into an aqueous form at the time of use. Thus a composition of the invention may be dried, such as a lyophilised formulation.

[0135] The composition may include preservatives such as thiomersal or 2-phenoxyethanol. It is preferred, however, that the vaccine should be substantially free from (i.e. less than 5 μg/ml) mercurial material e.g. thiomersal-free. Vaccines containing no mercury are more preferred. Preservative-free vaccines are particularly preferred. To improve thermal stability, a composition may include a temperature protective agent. Further details of such agents are provided below. To control tonicity, it is preferred to include a physiological salt, such as a sodium salt. Sodium chloride (NaCl) is preferred, which may be present at between 1 and 20 mg/ml e.g. about 10±2 mg/ml NaCl. Other salts that may be present include potassium chloride, potassium dihydrogen phosphate, disodium phosphate dehydrate, magnesium chloride, calcium chloride, etc. Compositions will generally have an osmolality of between 200 mOsm/kg and 400 mOsm/kg, preferably between 240-360 mOsm/kg, and will more preferably fall within the range of 290-310 mOsm/kg. Compositions may include one or more buffers. Typical buffers include: a phosphate buffer; a Tris buffer; a borate buffer; a succinate buffer; a histidine buffer (particularly with an aluminium hydroxide adjuvant); or a citrate buffer. Buffers will typically be included in the 5-20 mM range. The pH of a composition will generally be between 5.0 and 8.1, and more typically between 6.0 and 8.0 e.g. 6.5 and 7.5, or between 7.0 and 7.8. The composition is preferably sterile. The composition is preferably non-pyrogenic e.g. containing <1 EU (endotoxin unit, a standard measure) per dose, and preferably <0.1 EU per dose. The composition is preferably gluten free.

[0136] The composition may include material for a single immunisation, or may include material for multiple immunisations (i.e. a ‘multidose’ kit). The inclusion of a preservative is preferred in multidose arrangements. As an alternative (or in addition) to including a preservative in multidose compositions, the compositions may be contained in a container having an aseptic adaptor for removal of material. Human vaccines are typically administered in a dosage volume of about 0.5 ml, although a half dose (i.e. about 0.25 ml) may be administered to children.

[0137] Compositions of the invention may also comprise one or more immunoregulatory agents. Preferably, one or more of the immunoregulatory agents include one or more adjuvants. The adjuvants may include a TH1 adjuvant and/or a TH2 adjuvant. Adjuvants which may be used in compositions of the invention include, but are not limited to:
[0138] mineral salts, such as aluminium salts and calcium salts, including hydroxides (e.g. oxyhydroxides), phosphates (e.g. hydroxyphosphates, orthophosphates) and sulphates, etc. [e.g. see chapters 8 & 9 of ref. 95];
[0139] oil-in-water emulsions, such as squalene-water emulsions, including MF59 (5% Squalene, 0.5% Tween 80, and 0.5% Span 85, formulated into submicron particles using a microfluidizer) [Chapter 10 of ref. 95, see also ref. 96-99, chapter 10 of ref. 100 and chapter 12 of ref. 101], complete Freund's adjuvant (CFA) and incomplete Freund's adjuvant (IFA);
[0140] saponin formulations [chapter 22 of ref. 95], such as QS21 [102] and ISCOMs [chapter 23 of ref. 95];
[0141] virosomes and virus-like particles (VLPs) [103-109];
[0142] bacterial or microbial derivatives, such as non-toxic derivatives of enterobacterial lipopolysaccharide (LPS), Lipid A derivatives [110, 111], immunostimulatory oligonucleotides [112-117], such as IC-31™ [118] (deoxynucleotide comprising 26-mer sequence 5′-(IC)₁₃-3′ (SEQ ID NO: 354) and polycationic polymer polypeptide comprising 11-mer amino acid sequence KLKLLLLLKLK (SEQ ID NO: 355)) and ADP-ribosylating toxins and detoxified derivatives thereof [119-128];
[0143] human immunomodulators, including cytokines, such as interleukins (e.g. IL-1, IL-2, IL-4, IL-5, IL-6, IL-7, IL-12 [129, 130], interferons (e.g. interferon-γ), macrophage colony stimulating factor, and tumor necrosis factor;
[0144] bioadhesives and mucoadhesives, such as chitosan and derivatives thereof, esterified hyaluronic acid microspheres [131] or mucoadhesives, such as cross-linked derivatives of poly(acrylic acid), polyvinyl alcohol, polyvinyl pyrollidone, polysaccharides and carboxymethylcellulos [132];
[0145] microparticles (i.e. a particle of ˜100 nm to ˜150 μm in diameter, more preferably ˜200 nm to ˜30 μm in diameter, and most preferably ˜500 nm to ˜10 μm in diameter) formed from materials that are biodegradable and non-toxic (e.g. a poly(α-hydroxy acid), a polyhydroxybutyric acid, a polyorthoester, a polyanhydride, a polycaprolactone, etc.);
[0146] liposomes [Chapters 13 & 14 of [95, 133-135];
[0147] polyoxyethylene ethers and polyoxyethylene esters [136];
[0148] PCPP formulations [137 and 138];
[0149] muramyl polypeptides, including N-acetyl-muramyl-L-threonyl-D-isoglutamine (thr-MDP), N-acetyl-normuramyl-l-alanyl-d-isoglutamine (nor-MDP), and N-acetylmuramyl-l-alanyl-d-isoglutaminyl-l-alanine-2-(1′-2′-dipalmitoyl-sn-glycero-3-hydroxyphosphoryloxy)-ethylamine MTP-PE); and
[0150] imidazoquinolone compounds, including Imiquamod and its homologues (e.g. “Resiquimod 3M”) [139 and 140].

[0151] Compositions and vaccines of the invention may also comprise combinations of aspects of one or more of the adjuvants identified above. For example, the following adjuvant compositions may be used in the invention: (1) a saponin and an oil-in-water emulsion [141]; (2) a saponin (e.g. QS21)+a non-toxic LPS derivative (e.g. 3dMPL) [142]; (3) a saponin (e.g. QS21)+a non-toxic LPS derivative (e.g. 3dMPL)+a cholesterol; (4) a saponin (e.g. QS21)+3dMPL+IL-12 (optionally+a sterol) [143]; (5) combinations of 3dMPL with, for example, QS21 and/or oil-in-water emulsions [144]; (6) SAF, containing 10% squalane, 0.4% Tween 80™, 5% pluronic-block polymer L121, and thr-MDP, either microfluidized into a submicron emulsion or vortexed to generate a larger particle size emulsion. (7) Ribi™ adjuvant system (RAS), (Ribi Immunochem) containing 2% squalene, 0.2% Tween 80, and one or more bacterial cell wall components from the group consisting of monophosphorylipid A (MPL), trehalose dimycolate (TDM), and cell wall skeleton (CWS), preferably MPL+CWS (Detox™); and (8) one or more mineral salts (such as an aluminum salt)+a non-toxic derivative of LPS (such as 3dMPL).

[0152] Other substances that act as immunostimulating agents are disclosed in chapter 7 of [95[.The use of an aluminium hydroxide and/or aluminium phosphate adjuvant is particularly preferred, and antigens are generally adsorbed to these salts. Calcium phosphate is another preferred adjuvant. Other preferred adjuvant combinations include combinations of Th1 and Th2 adjuvants such as CpG & alum or resiquimod & alum. A combination of aluminium phosphate and 3dMPL may be used (this has been reported as effective in pneumococcal immunisation[145]).

[0153] The compositions of the invention may elicit both a cell mediated immune response as well as a humoral immune response. This immune response will preferably induce long lasting (e.g. neutralising) antibodies and a cell mediated immunity that can quickly respond upon exposure to C. difficile. Two types of T cells, CD4 and CD8 cells, are generally thought necessary to initiate and/or enhance cell mediated immunity and humoral immunity. CD8 T cells can express a CD8 co-receptor and are commonly referred to as Cytotoxic T lymphocytes (CTLs). CD8 T cells are able to recognized or interact with antigens displayed on MHC Class I molecules. CD4 T cells can express a CD4 co-receptor and are commonly referred to as T helper cells. CD4 T cells are able to recognize antigenic peptides bound to MHC class II molecules. Upon interaction with a MHC class II molecule, the CD4 cells can secrete factors such as cytokines. These secreted cytokines can activate B cells, cytotoxic T cells, macrophages, and other cells that participate in an immune response. Helper T cells or CD4+ cells can be further divided into two functionally distinct subsets: TH1 phenotype and TH2 phenotypes which differ in their cytokine and effector function. Activated TH1 cells enhance cellular immunity (including an increase in antigen-specific CTL production) and are therefore of particular value in responding to intracellular infections. Activated TH1 cells may secrete one or more of IL-2, IFN-γ, and TNF-β. A TH1 immune response may result in local inflammatory reactions by activating macrophages, NK (natural killer) cells, and CD8 cytotoxic T cells (CTLs). A TH1 immune response may also act to expand the immune response by stimulating growth of B and T cells with IL-12. TH1 stimulated B cells may secrete IgG2a. Activated TH2 cells enhance antibody production and are therefore of value in responding to extracellular infections. Activated TH2 cells may secrete one or more of IL-4, IL-5, IL-6, and IL-10. A TH2 immune response may result in the production of IgG1, IgE, IgA and memory B cells for future protection. An enhanced immune response may include one or more of an enhanced TH1 immune response and a TH2 immune response. A TH1 immune response may include one or more of an increase in CTLs, an increase in one or more of the cytokines associated with a TH1 immune response (such as IL-2, IFN-γ, and TNF-β), an increase in activated macrophages, an increase in NK activity, or an increase in the production of IgG2a. In some embodiments, the enhanced TH1 immune response will include an increase in IgG2a production. A TH1 immune response may be elicited using a TH1 adjuvant. A TH1 adjuvant will generally elicit increased levels of IgG2a production relative to immunization of the antigen without adjuvant. TH1 adjuvants suitable for use in the invention may include for example saponin formulations, virosomes and virus like particles, non-toxic derivatives of enterobacterial lipopolysaccharide (LPS), immunostimulatory oligonucleotides. Immunostimulatory oligonucleotides, such as oligonucleotides containing a CpG motif, are typical TH1 adjuvants for use in the invention. A TH2 immune response may include one or more of an increase in one or more of the cytokines associated with a TH2 immune response (such as IL-4, IL-5, IL-6 and IL-10), or an increase in the production of IgG1, IgE, IgA and memory B cells. In some embodiments, the enhanced TH2 immune response will include an increase in IgG1 production. A TH2 immune response may be elicited using a TH2 adjuvant. A TH2 adjuvant will generally elicit increased levels of IgG1 production relative to immunization of the antigen without adjuvant. TH2 adjuvants suitable for use in the invention include, for example, mineral containing compositions, oil-emulsions, and ADP-ribosylating toxins and detoxified derivatives thereof. Mineral containing compositions, such as aluminium salts are typical TH2 adjuvants for use in the invention.

[0154] In some embodiments, the invention includes a composition comprising a combination of a TH1 adjuvant and a TH2 adjuvant. Often, such a composition elicits an enhanced TH1 and an enhanced TH2 response, i.e., an increase in the production of both IgG1 and IgG2a production relative to immunization without an adjuvant. Generally, the composition comprising a combination of a TH1 and a TH2 adjuvant elicits an increased TH1 and/or an increased TH2 immune response relative to immunization with a single adjuvant (i.e., relative to immunization with a TH1 adjuvant alone or immunization with a TH2 adjuvant alone). The immune response may be one or both of a TH1 immune response and a TH2 response. The immune response may provide for one or both of an enhanced TH1 response and an enhanced TH2 response. The enhanced immune response may be one or both of a systemic and a mucosal immune response. The immune response may provide for one or both of an enhanced systemic and an enhanced mucosal immune response. Typically the mucosal immune response is a TH2 immune response. Typically the mucosal immune response includes an increase in the production of IgA.

[0155] C. difficile infections can affect various areas of the body and so the compositions of the invention may be prepared in various forms. For example, the compositions may be prepared as injectables, either as liquid solutions or suspensions. Solid forms suitable for solution in, or suspension in, liquid vehicles prior to injection can also be prepared (e.g. a lyophilised composition or a spray-freeze dried composition). The composition may be prepared for topical administration e.g. as an ointment, cream or powder. The composition may be prepared for oral administration e.g. as a tablet or capsule, as a spray, or as a syrup (optionally flavoured). The composition may be prepared for pulmonary administration e.g. as an inhaler, using a fine powder or a spray. The composition may be prepared as a suppository or pessary. The composition may be prepared for nasal, aural or ocular administration e.g. as drops. The composition may be in kit form, designed such that a combined composition is reconstituted just prior to administration to a mammal. Such kits may comprise one or more antigens in liquid form and one or more lyophilised antigens.

[0156] Where a composition is to be prepared extemporaneously prior to use (e.g. where a component is presented in lyophilised form) and is presented as a kit, the kit may comprise two vials, or it may comprise one ready-filled syringe and one vial, with the contents of the syringe being used to reactivate the contents of the vial prior to injection.

[0157] Compositions used as vaccines comprise an immunologically effective amount of antigen(s), as well as any other components, as needed. By ‘immunologically effective amount’, it is meant that the administration of that amount to an individual, either in a single dose or as part of a series, is effective for treatment or prevention. This amount varies depending upon the health and physical condition of the individual to be treated, age, the taxonomic group of individual to be treated (e.g. non-human primate, primate, etc.), the capacity of the individual's immune system to synthesise antibodies, the degree of protection desired, the formulation of the vaccine, the treating doctor's assessment of the medical situation, and other relevant factors. It is expected that the amount will fall in a relatively broad range that can be determined through routine trials. Where more than one antigen is included in a composition then two antigens may be present at the same dose as each other or at different doses.

[0158] As mentioned above, a composition may include a temperature protective agent, and this component may be particularly useful in adjuvanted compositions (particularly those containing a mineral adjuvant, such as an aluminium salt). As described in reference 146, a liquid temperature protective agent may be added to an aqueous vaccine composition to lower its freezing point e.g. to reduce the freezing point to below 0° C. Thus the composition can be stored below 0° C., but above its freezing point, to inhibit thermal breakdown. The temperature protective agent also permits freezing of the composition while protecting mineral salt adjuvants against agglomeration or sedimentation after freezing and thawing, and may also protect the composition at elevated temperatures e.g. above 40° C. A starting aqueous vaccine and the liquid temperature protective agent may be mixed such that the liquid temperature protective agent forms from 1-80% by volume of the final mixture. Suitable temperature protective agents should be safe for human administration, readily miscible/soluble in water, and should not damage other components (e.g. antigen and adjuvant) in the composition. Examples include glycerin, propylene glycol, and/or polyethylene glycol (PEG). Suitable PEGs may have an average molecular weight ranging from 200-20,000 Da. In one embodiment, the polyethylene glycol can have an average molecular weight of about 300 Da (′PEG-300′).

[0159] The invention provides a composition comprising: (i) one or more antigen(s) as disclosed above; and (ii) a temperature protective agent. This composition may be formed by mixing (i) an aqueous composition comprising one or more antigen(s) (e.g. 2, 3, 4, 5, 6, 7, 8, 9, 10, 11 or 12 of the antigens of the antigen combination), with (ii) a temperature protective agent. The mixture may then be stored e.g. below 0° C., from 0-20° C., from 20-35° C., from 35-55° C., or higher. It may be stored in liquid or frozen form. The mixture may be lyophilised. The composition may alternatively be formed by mixing (i) a dried composition comprising one or more antigen(s), with (ii) a liquid composition comprising the temperature protective agent. Thus component (ii) can be used to reconstitute component (i).

Combinations with C. difficile Saccharide Conjugates

[0160] The polypeptides of the invention may be used in combination with, or conjugated to saccharide polypeptides. Thus the invention provides a composition comprising a combination of: (1) one or more polypeptide(s) and/or antibodies and (2) one or more conjugates of a C. difficile saccharide and a carrier protein; or one or more polypeptide(s) and/or antibodies conjugated to a C. difficile saccharide and optionally a carrier protein. The combination may be used in a method of treating or preventing C. difficile infection, or in a method of generating an immune response, as described above.

[0161] A conjugate used in component (2) of this combination includes a saccharide moiety and a carrier moiety. The saccharide moiety is from C. difficile. The C. difficile saccharide may in particular be selected from the PS-I, PS-II and PS-III saccharides described in reference 147. PS-I comprises repeating pentasaccharide units of formula A:

[chemical structure]

[0162] wherein Rha is rhamnose, P is glycosyl phosphate and Glc is glucose. In particular, the PS-I saccharide used in the present invention may be of formula A′:

[chemical structure]

[0163] wherein n is an integer from 1 to 1000, Rha is rhamnose, P is glycosyl phosphate and Glc is glucose.

[0164] PS-II comprises repeating hexasaccharide units of formula B:

[chemical structure]

[0165] wherein Glc is glucose, GaINAc is N-acetyl-galactosamine, P is glycosyl phosphate and Man is mannose.

[0166] In particular, the PS-II saccharide used in the present invention may be of the formula B′:

[chemical structure]

[0167] wherein n is an integer from 1 to 1000, Glc is glucose, GaINAc is N-acetyl-galactosamine, P is glycosyl phosphate and Man is mannose.

[0168] PS-III comprises glycerol, alditol phosphate, glucose, and N-acetyl-glucosamine within its covalent chemical structure. In the above formulae (A′) and (B′), the value of integer n is typically between 1 and 100, e.g. between 2 and 100, between 10 and 100 or between 25 and 100. The carrier moiety in the conjugates used in component (2) will usually be a protein and may or may not be one of the polypeptides of (1). Typical carrier proteins are bacterial toxins, such as diphtheria or tetanus toxins, or toxoids or mutants or fragments thereof. The CRM197 diphtheria toxin mutant [148] is useful. Other suitable carrier proteins include the N.meningitidis outer membrane protein complex [149], synthetic peptides [150,151], heat shock proteins [152,153], pertussis proteins [154,155], cytokines [156], lymphokines [156], hormones [156], growth factors [156], artificial proteins comprising multiple human CD4⁺ T cell epitopes from various pathogen-derived polypeptides [157] such as N19 [158], protein D from H.influenzae [159-161], pneumolysin [162] or its non-toxic derivatives [163], pneumococcal surface protein PspA [164], iron-uptake proteins [165], toxin A or B from C.difficile [166], recombinant P.aeruginosa exoprotein A (rEPA) [167], etc. In some embodiments the carrier protein is a S. aureus protein. In other embodiments the carrier is a C. difficile polypeptide of the invention.

[0169] Where a composition includes more than one conjugate, each conjugate may use the same carrier protein or a different carrier protein. Conjugates may have excess carrier (w/w) or excess saccharide (w/w). In some embodiments, a conjugate may include substantially equal weights of each. The carrier molecule may be covalently conjugated to the carrier directly or via a linker. Direct linkages to the protein may be achieved by, for instance, reductive amination between the saccharide and the carrier, as described in, for example, reference 168. Linkages via a linker group may be made using any known procedure, for example, the procedures described in references 169 and 170. One type of linkage is an adipic acid linker, which may be formed by coupling a free —NH₂ group (e.g. introduced to the saccharide by amination) with adipic acid (using, for example, diimide activation), and then coupling a protein to the resulting saccharide-adipic acid intermediate [171,172]. Another type of linkage is a carbonyl linker, which may be formed by reaction of a free hydroxyl group of a saccharide CDI [173, 174] followed by reaction with a protein to form a carbamate linkage. Other linkers include 6-propionamido [175], nitrophenyl-ethylamine [176], haloacyl halides [177], glycosidic linkages [178], 6-aminocaproic acid [179], ADH [180], C₄ to C₁₂ moieties [181], etc. Carbodiimide condensation can also be used [182].

[0170] C. difficile saccharide polypeptide conjugates may be prepared in various ways e.g. by a process comprising: a) activating the C. difficile saccharide by adding a linker comprising a maleimide group to form an activated C. difficile saccharide; b) activating the carrier protein by adding a linker comprising a sulphydryl group to form an activated carrier protein; and c) reacting the activated C. difficile saccharide and the activated carrier protein to form a C. difficile saccharide-carrier protein conjugate; or by a process comprising a) activating the C. difficile saccharide by adding a linker comprising a sulphydryl group to form an activated C. difficile saccharide; b) activating the carrier protein by adding a linker comprising a maleimide group to form an activated carrier protein; and c) reacting the activated C. difficile saccharide and the activated carrier protein to form a C. difficile saccharide-carrier protein conjugate; or by a process comprising a) activating the C. difficile saccharide by adding a linker comprising a sulphydryl group to form an activated C. difficile saccharide; b) activating the carrier protein by adding a linker comprising a sulphydryl group to form an activated carrier protein; and c) reacting the activated C. difficile saccharide and the activated carrier protein to form a C. difficile saccharide-carrier protein conjugate. These conjugates may be combined with any of the polypeptides disclosed herein.

### Additional Antigens

[0171] Often, a single composition may be used to provide immunity to a range of infectious agents. Accordingly the composition may comprise antigens not only from C. difficile, but also from other bacteria, viruses etc. The invention thus provides a composition comprising one or more polypeptides of the invention and one or more of the following antigens: a protein antigen from Helicobacter pylori such as VacA, CagA, NAP, HopX, HopY [183] and/or urease; a protein antigen from N.meningitidis serogroup B [184], with protein ‘287’ and derivatives being particularly useful; an outer-membrane vesicle (OMV) preparation from N.meningitidis serogroup B, such as those disclosed in 185; a saccharide antigen from N.meningitidis serogroup A, C, W135 and/or Y, such as the oligosaccharide disclosed in 186 from serogroup C [see also 187]; a saccharide antigen from Streptococcus pneumoniae [188]; an antigen from hepatitis A virus, such as inactivated virus [189]; an antigen from hepatitis B virus, such as the surface and/or core antigens [e.g. 190]; an antigen from hepatitis C virus [e.g.191]; an antigen from Bordetella pertussis, such as pertussis holotoxin (PT) and filamentous haemagglutinin (FHA) from B.pertussis, optionally also in combination with pertactin and/or agglutinogens 2 and 3 [e.g. 192]; a diphtheria antigen, such as a diphtheria toxoid [e.g.193] e.g. the CRM₁₉₇ mutant [e.g.194]; a tetanus antigen, such as a tetanus toxoid [e.g.195]; a saccharide antigen or polypeptide from Haemophilus influenzae B; an antigen from N.gonorrhoeae [e.g. 196]; an antigen from Chlamydia pneumoniae [e.g. 197]; an antigen from Chlamydia trachomatis [e.g. 198]; an antigen from Porphyromonas gingivalis [e.g. 199]; polio antigen(s) [e.g.200] such as IPV or OPV; rabies antigen(s) [e.g. 201] such as lyophilised inactivated virus [e.g. 202; RabAvert™]; measles, mumps and/or rubella antigens [e.g. 203]; influenza antigen(s) [e.g. 204], such as the haemagglutinin and/or neuraminidase surface proteins; an antigen from Moraxella catarrhalis [e.g. 205]; an antigen from Staphylococcus aureus [e.g. 206]; an protein antigen from Streptococcus agalactiae (group B streptococcus) [e.g. 207, 208]; a saccharide antigen from Streptococcus agalactiae (group B streptococcus). Particularly, the invention provides a composition comprising one or more polypeptides of the invention and one or more antigens from Staphylococcus aureus [e.g. 209].

### Methods of Treatment, and Administration of the Vaccine

[0172] The invention provides polypeptides, nucleic acids, antibodies or compositions for use in prevention or treatment of infection by C. difficile or for the treatment, prevention or reduction in the severity of C. difficile spore induced disease relapse, or for the treatment, prevention or the reduction of colonisation of the gut by C. difficile in a subject. The subject may be an animal particularly a mammal, more particularly a human, but by way of non-limiting example, may also be an animal of commercial importance such as a cow, a pig, a sheep, a horse or a domestic animal or pet such as a cat, dog, mouse, rat, rabbit, gerbil or hamster. In certain embodiments the subject may be an avian subject such as, for example, a chicken, goose, turkey and the like.

[0173] In another embodiment, the invention provides polypeptides, nucleic acids, antibody or composition for use in prevention or treatment of infection by C. difficile or for the treatment, prevention or reduction in the severity of C. difficile spore induced disease relapse, or for the treatment, prevention or the reduction of colonisation of the gut by C. difficile in a subject for sequential, simultaneous or concomitant administration with an antibiotic compound. Particularly the subject is an animal, more particularly a mammal, and yet more particularly a human, for example, an adult or child. Particularly the human is a pregnant woman or a child, particularly a child under ten years of age. The subject may also be a patient receiving broad-spectrum antibiotic treatment with, for example, vancomycin.

[0174] In another embodiment the invention provides polypeptides, nucleic acids, antibodies or compositions for use in prevention or treatment of infection by C. difficile or for the treatment, prevention or reduction in the severity of C. difficile spore induced disease relapse, or for the treatment, prevention or the reduction of colonisation of the gut by C. difficile in a human wherein the human is >50 years old and/or suffering from a nosocomial C. difficile infection.

[0175] Particularly the invention provides polypeptides, nucleic acids, antibody or composition for use in prevention or treatment of diarrhoea, antibiotic associated diarrhoea (AAD), abdominal pain, abdominal cramping, dehydration, fever, leukocytosis, pseudomembranous colitis or toxic megacolon associated with C. difficile infection.

[0176] In a further embodiment the invention provides polypeptides, nucleic acids, antibody or composition for use in prevention or treatment of diarrhoea, antibiotic associated diarrhoea (AAD), abdominal pain, fever, leukocytosis, pseudomembranous colitis or toxic megacolon associated with C. difficile infection for sequential, simultaneous or concomitant administration with an antibiotic compound.

[0177] In another embodiment the invention provides the use of a polypeptide, nucleic acid, antibody or composition of the invention in the manufacture of a medicament for preventing or treating a C. difficile infection or for the treatment, prevention or reduction in the severity of C. difficile spore induced disease relapse, or for the treatment, prevention or the reduction of colonisation of the gut by C. difficile in a subject.

[0178] In another embodiment the invention provides a method for preventing or treating a C. difficile infection in a mammal or for the treatment, prevention or reduction in the severity of C. difficile spore induced disease relapse, or in the treatment, prevention or the reduction of colonisation of the gut by C. difficile comprising the step of administering (a) at least one polypeptide comprising, consisting essentially or consisting of an amino acid sequence selected from the group consisting of SEQ ID NOs 79, 81, 93, 105, 111, 113, 125, 133, 139, 141, 153, 165, 171, 173, 185, 187, 189, 300, 322, 357, 359, 361, 433, 435, 437, 439, 441, 443, 445, 447, 449, 451, 453, 455, 457, 459, 461, 463 and 465, more preferably selected from the group consisting of SEQ ID NOs 79, 139, 133, 433, 111, 171, 113 and 173, (b) at least one nucleic acid which encodes an amino acid sequence selected from the group recited in (a), and/or (c) at least one antibody capable of binding to an amino acid sequence selected from the group recited in (a), to the subject.

[0179] In another embodiment the invention provides a method for preventing or treating a C. difficile infection or for the treatment, prevention or reduction in the severity of C. difficile spore induced disease relapse, or for the treatment, prevention or the reduction of colonisation of the gut by C. difficile in a subject comprising the step of administering at least one nucleic acid selected from the group consisting of 78, 80, 92, 104, 110, 112, 124, 132, 138, 140, 152, 164, 170, 172, 184, 186, 188, 356, 358, 360, 432, 434, 436, 438, 440, 442, 444, 446, 448, 450, 452, 454, 456, 458, 460, 462 and 464 to the subject, preferably selected from the group consisting of SEQ ID NOs: 78, 132, 138, 432, 110, 170, 112 and 172.

[0180] In a method for preventing or treating a C. difficile infection or for the treatment, prevention or reduction in the severity of C. difficile spore induced disease relapse, or for the treatment, prevention or the reduction of colonisation of the gut by C. difficile in a subject comprising the step of administering at least one antibody, the antibody is preferably a neutralizing antibody.

[0181] As discussed above, combinations of the antigens referred to above with one or more additional antigens which provide a protective effect against C. difficile, or against CDAD are preferred. The combinations and compositions comprising these combinations as disclosed elsewhere herein can thus be used equally in the above methods. Combinations of the antigens referred to above are preferably made with ToxB_GT and TcdA antigens, even more preferably ToxB-GT and ToxAp 5_{—}6 antigens. The methods of the invention thus include methods in which one or more additional antigens which provide a protective effect against C. difficile, or against CDAD are also administered, with preferred such antigens being ToxB-GT and ToxAp 5_{—}6. Nucleotide molecules encoding such antigens may also be used, as may antibodies which bind to such antigens, as discussed elsewhere. In all cases where more than one antigen (or nucleotide molecule or antibody) is used the antigens (or nucleotide molecules or antibodies) may be administered sequentially, simultaneously or separately.

[0182] In another embodiment the invention provides a method for preventing or treating a C. difficile infection or for the treatment, prevention or reduction in the severity of C. difficile spore induced disease relapse, or for the treatment, prevention or the reduction of colonisation of the gut by C. difficile in a subject comprising the step of administering a composition of the invention to the subject.

[0183] In a further embodiment the invention provides a method for preventing or treating a C. difficile infection or for the treatment, prevention or reduction in the severity of C. difficile spore induced disease relapse, or for the treatment, prevention or the reduction of colonisation of the gut by C. difficile in a subject comprising the step of administering a composition of the invention to the subject wherein the composition comprises at least one pharmaceutical carrier(s) and/or excipients.

[0184] In another embodiment the invention provides a method for preventing or treating a C. difficile infection or for the treatment, prevention or reduction in the severity of C. difficile spore induced disease relapse, or for the treatment, prevention or the reduction of colonisation of the gut by C. difficile in a subject comprising the step of administering a composition of the invention to the subject wherein the composition is a pharmaceutical or vaccine composition. The method may be used for raising an immune response, or preventing or treating a C. difficile infection or for the treatment, prevention or reduction in the severity of C. difficile spore induced disease relapse, or for the treatment, prevention or the reduction of colonisation of the gut by C. difficile, in a subject. Methods of the invention may also further comprise administration of an antibiotic.

[0185] C. difficile is also known to infect a range of mammals, both wild and domestic. The disease is very similar to that observed in humans, but the heterogeneity of isolates has been observed to be lower [2]. The compositions and methods of the invention thus may be used to treat mammals such as horse, pigs and cows, inter alia, where C. difficile infection has been demonstrated.

[0186] In some embodiments the mammal has recently received antibiotics, is currently receiving antibiotics, or is about to receive antibiotics. Particularly preferred mammals are primates, more preferably humans. The human may be a child (e.g. a toddler or infant) a teenager or an adult. A composition intended for children may also be administered to adults e.g. to assess safety, dosage, immunogenicity, etc. The human may be undergoing treatment in hospital.

[0187] Vaccines prepared according to the invention may be used to treat both human children and adults. Thus a human may be less than 1 year old, 1-5 years old, 5-15 years old, 15-55 years old, or at least 55 years old. The humans for receiving the vaccines may be elderly (e.g. ≧50 years old, ≧60 years old, and preferably ≧65 years), the young (e.g. ≦5 years old), hospitalised patients, healthcare workers, armed service and military personnel, pregnant women, the chronically ill, or immunodeficient patients. The vaccines are not suitable solely for these groups, however, and may be used more generally in a population.

[0188] Vaccines produced by the invention may be administered to humans at substantially the same time as (e.g. during the same medical consultation or visit to a healthcare professional or vaccination centre) other vaccines e.g. at substantially the same time as an influenza vaccine, a measles vaccine, a mumps vaccine, a rubella vaccine, a MMR vaccine, a varicella vaccine, a MMRV vaccine, a diphtheria vaccine, an S. aureus vaccine, a tetanus vaccine, a pertussis vaccine, a DTP vaccine, a conjugated H.influenzae type b vaccine, an inactivated poliovirus vaccine, a hepatitis B virus vaccine, a meningococcal conjugate vaccine (such as a tetravalent A-C-W135-Y vaccine), a respiratory syncytial virus vaccine, etc.

[0189] The invention also provides a kit comprising a composition of the invention. The kit may further comprise one or more of the following: instructions, syringe or other delivery device, adjuvant, antibiotic or pharmaceutically acceptable formulating solution. The invention also provides a delivery device pre-filled with a composition of the invention.

[0190] One way of checking efficacy of therapeutic treatment involves monitoring C. difficile infection after administration of the compositions of the invention to the mammal. One way of checking efficacy of prophylactic treatment involves monitoring immune responses, systemically (such as monitoring the level of IgG1 and IgG2a production) and/or mucosally (such as monitoring the level of IgA production), against the polypeptides in the compositions of the invention after administration of the composition. Typically, polypeptide-specific serum antibody responses are determined post-immunisation but pre-challenge whereas polypeptide-specific mucosal antibody responses are determined post-immunisation and post-challenge. Another way of assessing the immunogenicity of the compositions of the present invention is to express the proteins recombinantly for screening mammal sera or mucosal secretions by immunoblot and/or microarrays. A positive reaction between the protein and the mammal sample indicates that the mammal has mounted an immune response to the protein in question. This method may also be used to identify immunodominant polypeptides and/or epitopes within polypeptides. The efficacy of vaccine compositions can also be determined in vivo by challenging animal models of C. difficile infection, e.g., guinea pigs or mice, with the vaccine compositions.

[0191] Compositions of the invention will generally be administered directly to a mammal. Direct delivery may be accomplished by parenteral injection (e.g. subcutaneously, intraperitoneally, intravenously, intramuscularly, or to the interstitial space of a tissue), or mucosally, such as by rectal, oral (e.g. tablet, spray), vaginal, topical, transdermal or transcutaneous, intranasal, ocular, aural, pulmonary or other mucosal administration.

[0192] The invention may be used to elicit systemic and/or mucosal immunity, for example to elicit an enhanced systemic and/or mucosal immunity. Typically the enhanced systemic and/or mucosal immunity is reflected in an enhanced TH1 and/or TH2 immune response. Often, the enhanced immune response includes an increase in the production of IgG1 and/or IgG2a and/or IgA.

[0193] Dosage can be by a single dose schedule or a multiple dose schedule. Multiple doses may be used in a primary immunisation schedule and/or in a booster immunisation schedule. In a multiple dose schedule the various doses may be given by the same or different routes e.g. a parenteral prime and mucosal boost, a mucosal prime and parenteral boost, etc. Multiple doses will typically be administered at least 1 week apart (e.g. about 2 weeks, about 3 weeks, about 4 weeks, about 6 weeks, about 8 weeks, about 10 weeks, about 12 weeks, about 16 weeks, etc.).

[0194] Strains and Variants

[0195] The polypeptides of the invention were originally derived from C. difficile strain 630. As such they may be referred to as C. difficile antigens However, it will be apparent to one skilled in the art that polypeptides of the invention are useful for immunisation against CDAD caused by multiple different strains of C. difficile. Thus, the invention is not limited to compositions comprising polypeptides and/or fragments derived only from the strain 630 and strain SM. Sequences of several strains of C. difficile are available, including those of C. difficile strains R20291(SM), C. difficile strain 196, C. difficile strain B11, C. difficile strain BI/NAP1/027 (ribotype 027), C. difficile strain M120 and C. difficile strain M68, strain 855, strain QCD-63q42, strain ATCC43255.

[0196] Standard search and alignment techniques can be used to identify in any further genome sequences the homolog of any particular sequence from the C. difficile strain, for example in strain ATCC43255, strain CIP107932, strain QCD-23m63, strain QCD-32g58, strain QCD-37x79, strain 855, strain QCD-63q42, strain QCD-66c26, strain QCD-76w55, strain QCD-97b34, strain CD196, strain CDBI1, strain CDCF5, strain CDSM, strain CDM68, strain CDM120 or strain R20291. Moreover, the available sequences from the present C. difficile strain can be used to design primers for amplification of homologous sequences from other strains. Thus the invention is not limited to polypeptides from this strain, but rather encompasses such variants and homologs from other strains of C. difficile, as well as non-natural variants. In general, suitable variants of a particular SEQ ID NO include its allelic variants, its polymorphic forms, its homologs, its orthologs, its paralogs, its mutants, etc.

[0197] Thus, for instance, polypeptides used with the invention may, compared to the SEQ ID NOs herein, include one or more (e.g. 1, 2, 3, 4, 5, 6, 7, 8, 9, etc.) amino acid substitutions, such as conservative substitutions (i.e. substitutions of one amino acid with another which has a related side chain). Genetically-encoded amino acids are generally divided into four families: (1) acidic i.e. aspartate, glutamate; (2) basic i.e. lysine, arginine, histidine; (3) non-polar i.e. alanine, valine, leucine, isoleucine, proline, phenylalanine, methionine, tryptophan; and (4) uncharged polar i.e. glycine, asparagine, glutamine, cysteine, serine, threonine, tyrosine. Phenylalanine, tryptophan, and tyrosine are sometimes classified jointly as aromatic amino acids. In general, substitution of single amino acids within these families does not have a major effect on the biological activity. The polypeptides may also include one or more (e.g. 1, 2, 3, 4, 5, 6, 7, 8, 9, etc.) single amino acid deletions relative to the SEQ ID NO sequences. The polypeptides may also include one or more (e.g. 1, 2, 3, 4, 5, 6, 7, 8, 9, etc.) insertions (e.g. each of 1, 2, 3, 4 or 5 amino acids) relative to the SEQ ID NO sequences.

[0198] Similarly, a polypeptide used with the invention may comprise an amino acid sequence that: (a) is identical (i.e. 100% identical) to a sequence disclosed in the sequence listing; (b) shares sequence identity (e.g. 50%, 60%, 70%, 80%, 85%, 90%, 91%, 92%, 93%, 94%, 95%, 96%, 97%, 98%, 99%, 99.5% or more) with a sequence disclosed in the sequence listing; (c) has 1, 2, 3, 4, 5, 6, 7, 8, 9 or 10 (or more) single amino acid alterations (deletions, insertions, substitutions), which may be at separate locations or may be contiguous, as compared to the sequences of (a) or (b); and implemented in the needle tool in the EMBOSS package [210] when aligned with a particular sequence from the sequence listing using a pairwise alignment algorithm, each moving window of x amino acids from N-terminus to C-terminus (such that for an alignment that extends to p amino acids, where p>x, there are p−x+1 such windows) has at least x·y identical aligned amino acids, where: x is selected from 20, 25, 30, 35, 40, 45, 50, 60, 70, 80, 90, 100, 150, 200; y is selected from 0.50, 0.60, 0.70, 0.75, 0.80, 0.85, 0.90, 0.91, 0.92, 0.93, 0.94, 0.95, 0.96, 0.97, 0.98, 0.99; and if x·y is not an integer then it is rounded up to the nearest integer. The preferred pairwise alignment algorithm is the Needleman-Wunsch global alignment algorithm [211], using default parameters (e.g. with Gap opening penalty=10.0, and with Gap extension penalty=0.5, using the EBLOSUM62 scoring matrix).

[0199] In general, when a polypeptide of the invention comprises a sequence that is not identical to a complete C. difficile sequence from the sequence listing (e.g. when it comprises a sequence listing with <100% sequence identity thereto, or when it comprises a fragment thereof) it is preferred in each individual instance that the polypeptide can elicit an antibody which recognises the respective complete C. difficile sequence. Where hybrid polypeptides are used, the individual antigens within the hybrid (i.e. individual —X— moieties) may be from one or more strains. Where n=2, for instance, X₂ may be from the same strain as X₁ or from a different strain. Where n=3, the strains might be (i) X₁═X₂═X₃ (ii) X₁═X₂≠X₃ (iii) X₁≠X₂═X₃ (iv) X₁≠X₂≠X₃ or (v) X₁═X₃≠X₂, etc. Within group (c), deletions or substitutions may be at the N-terminus and/or C-terminus, or may be between the two termini. Thus a truncation is an example of a deletion. Truncations may involve deletion of up to 40 (or more) amino acids at the N-terminus and/or C-terminus.

[0200] In view of the above, the term “C. difficile antigen” of “C. difficile polypeptide” includes molecules as defined above, e.g. which are variants or homologs from other strains of C. difficile, or which are non-natural or non-naturally occurring variants of the polypeptides or antigens referred to herein and/or provided in the sequence listing, and which preferably satisfy the sequence criteria defined above.

[0201] The invention also provides polypeptides belonging to the family of zinc mettallopeptidases having mutations that decrease the toxicity of polypeptides. Suitable polypeptides include Dif153 (CD2830). Exemplary mutations that decrease the toxicity include a deletion of all or a portion of the zincin metalloprotease domain and a point mutation in zincin metalloprotease domain which reduces the protease activity. Detoxification may be achieved by mutating the amino acid sequence or the encoding nucleic acid sequence of these polypeptides using any appropriate method known in the art e.g. site-directed mutagenesis. Preferably, the polypeptides belonging to the family of zinc mettallopeptidases comprises one or more amino acid substitutions (i.e. 1, 2, 3, 4, 5, 6, 7, 8, 9, 10, 11, 12, 13, 14, 15, 16, 17, 18, 19, 20, 25, 30, or more mutations), relative to the sequence of the wild type polypeptides belonging to the family of zinc mettallopeptidases. For example, the Dif153 (CD2830) polypeptide comprises one or more amino acid substitutions (i.e. 1, 2, 3, 4, 5, 6, 7, 8, 9, 10, 11, 12, 13, 14, 15, 16, 17, 18, 19, 20, 21, 22, 23, 24, 25, or more mutations), e.g. substitution of amino acid number at amino acid positions 134, 142, 143, 146, 149, 150, 178, 184 and/or 208 relative to the wild-type Dif153 (CD2830) polypeptide sequence of SEQ ID NO: 300 and 435. For example, the Dif153 (CD2830) polypeptide may comprise substitutions at 1, 2, 3, 4 or 5 positions corresponding to amino acids 134, 142, 143, 146, 149, 150, 178, 184 and/or 208 of the Dif153 (CD2830) polypeptide sequence of SEQ ID NO: 300 and 435. In particular, 1, 2, 3, 4 or 5 amino acids at positions corresponding to amino acids 134, 142, 143, 146, 149, 150, 178, 184 and/or 208 relative to the wild-type Dif153 (CD2830) polypeptide sequence of SEQ ID NO: 300 and 435 may be substituted, preferably by alanine (A), phenylalanine (F), arginine (R), serine (S) residues. Examples of single mutants of Dif153 (CD2830) are H142A, E143A, E143R, H146A, D149A, H150A, Y178F and C208S. Examples of double mutants of Dif153 (CD2830) are H142A/H146A; H142A/Y178F; H142A/E143R; H142A/E143A; E142A/Y178F relative to the wild-type CT153 (CD2830) polypeptide sequence of SEQ ID NO: 300 and 435. The invention provides also other mutants for the CT153 (CD2830) polypeptide alone or in combination: H142A/H150A and E143A/D149A. The foregoing detoxified immunogenic polypeptides preferably retain at least one epitope or immunogenic fragment of SEQ ID NO: 300 and 435.

[0202] The invention also provides a C. difficile bacterium comprising mutations, particularly a C. difficile bacterium in which one or more of the polypeptides detailed in the examples has/have been knocked out. Techniques for producing knockout bacteria are well known, and knockout C. difficile strains have been reported. A knockout mutation may be situated in the coding region of the gene or may lie within its transcriptional control regions (e.g. within its promoter). A knockout mutation will reduce the level of mRNA encoding the polypeptide to <1% of that produced by the wild-type bacterium, preferably <0.5%, more preferably <0.1%, and most preferably to 0%. The invention also provides a bacterium, such as a C. difficile bacterium, that constitutively expresses a polypeptide of the invention. The invention also provides a Clostridium bacterium comprising a gene encoding a polypeptide of the invention, wherein the gene is under the control of an inducible promoter. Such bacteria may be useful in testing and development or in the preparation of attenuated vaccines.

### General

[0203] The practice of the present invention will employ, unless otherwise indicated, conventional methods of chemistry, biochemistry, molecular biology, immunology and pharmacology, within the skill of the art. Such techniques are explained fully in the literature. See, e.g., [212-219, etc.]. In some implementations, the term “comprising” refers to the inclusion of the indicated active agent, such as recited polypeptides, as well as inclusion of other active agents, and pharmaceutically acceptable carriers, excipients, emollients, stabilizers, etc., as are known in the pharmaceutical industry. In some implementations, the term “consisting essentially of” refers to a composition, whose only active ingredient is the indicated active ingredient(s), however, other compounds may be included which are for stabilizing, preserving, etc. the formulation, but are not involved directly in the therapeutic effect of the indicated active ingredient. Use of the transitional phrase “consisting essentially” means that the scope of a claim is to be interpreted to encompass the specified materials or steps recited in the claim, and those that do not materially affect the basic and novel characteristic(s) of the claimed invention. See, In re Herz, 537 F.2d 549, 551-52, 190 USPQ 461, 463 (CCPA 1976) (emphasis in the original); see also MPEP §2111.03. Thus, the term “consisting essentially of” when used in a claim of this invention is not intended to be interpreted to be equivalent to “comprising”. The term “consisting of” and variations thereof includes “including” and “limited to” unless expressly specified otherwise. The term “about” in relation to a numerical value x means, for example, x±10%, x±5%, x±4%, x±3%, x±2%, x±1%.

[0204] While certain embodiments of the present invention have been described and specifically exemplified above, it is not intended that the invention be limited to such embodiments. Various modifications may be made thereto without departing from the scope and spirit of the present invention as set forth in the following claims.

### EXAMPLES

### Example 1

### Identification of C. difficile Polypeptides

[0205] In order to identify polypeptides for use in the provision of vaccines against C. difficile, the Inventors analysed the whole ensemble of around 3780 predicted polypeptides encoded by C. difficile 630 using the PSORT program (220). This identified proteins with a predicted peripheral sub-cellular localisation. In particular the following groups were identified:
[0206] Cell wall associated proteins, identified by the presence of the typical LPXTG-like motif which represents the site of attachment to the protein to the external side of the bacterial cell wall.
[0207] Extracellular proteins, identified by the presence of an N-terminal leader peptide that typically directs the protein products to the extra cellular milieu, and/or by sequence similarity to other bacterial proteins known to be exported.
[0208] Proteins with a bacterial surface location.

[0209] Other polypeptides were selected for their sequence homology to known virulence factors and polypeptide motifs involved in the interaction with the host. Several polypeptides of unknown function have also been identified. The polypeptides were then tested and screened using the methodology described in the following examples:

### Example 2

### Identification of Secreted C. difficile Polypeptides

[0210] Clostridium difficile secretome preparation was performed as followed: C. difficile (strains 630 and Stoke Mandeville) was grown both in Brain Heart Infusion (BHI) or Chemically Defined Medium (CDM, M. N. Mickelson, J. of Bact., 1964, 88:158-164). Bacteria were plated over-night on agar plate and then grown in 100 mL of appropriate medium under anaerobic condition at 37° C. until mid-Log phase (OD₆₀₀ of 0.5) or early stationary phase (OD₆₀₀ of 0.9) was reached. Bacteria were removed by centrifugation at 3,500×g for 10 min at 4° C. and the supernatant was filtered through a 0.22 μm pore size filter (Millipore). Proteins present in the supernatant were precipitated o/n with 10% w/v trichloroacetic acid, 0.04% w/v sodium deoxycholate. Proteins were resuspended in 50 mM ammonium bicarbonate containing 5 mM dithiothreitol, 0.1% Rapigest® (Waters), heated at 90° C. for 10 min and digested o/n with 2 ug of trypsin (Promega). Proteolitic digestion was stopped adding 0.1% v/v formic acid. Resulting peptides were subsequently analyzed by mass spectrometry.

[0211] Protein identification by nano-LC/MS/MS was perfomed as followed: peptides were separated by nano-LC on a NanoAcquity UPLC system (Waters) connected to a Q-ToF Premier Electro Spray Ionization (ESI) mass spectrometer equipped with a nanospray source (Waters). Samples were loaded onto a NanoAcquity 1.7 μm BEH130 C₁₈ column (75 μm×25 cm, Waters) through a NanoAcquity 5 μm Symmetry® C₁₈ trap column (180 μm×20 mm, Waters). Peptides were eluted with a 120-min gradient of 2-40% of 98% acetonitrile, 0.1% formic acid solution at 250 nl/min flow rate.

[0212] The eluted peptides were subjected to an automated data-dependent acquisition using the MassLynx software, version 4.1 (Waters), in which a MS survey scan was used to automatically select multicharged peptides over the m/z ratio range of 300-2,000 for further MS/MS fragmentation. Up to five different components were subjected to MS/MS fragmentation at the same time. After data acquisition, individual MS/MS spectra were combined, smoothed, and centroided using ProteinLynx, version 3.5 (Waters), to obtain the peak list file. The Mascot Daemon application (MatrixScience Ltd., London, UK) was used for the automatic submission of data files to a version of MASCOT (version 2.2.1) running on a local server.

[0213] Protein identification was achieved by searching in a locally curated database combining protein sequence data derived from the Clostridium difficile section of the NCBInr database, the total number of sequences and residues being 71233 and 21677396, respectively. The MASCOT search parameters were set to (i) 1 as number of allowed missed cleavages for trypsin digestion, (ii) methionine oxidation and glutamine and asparagine deamidation as variable modifications, (iii) 0.2 Da as peptide tolerance, and (iv) 0.2 Da as MS/MS tolerance. Only significant hits were considered, as defined by the MASCOT scoring and probability system. The score thresholds for acceptance of peptide identification were ≧33 for trypsin digestion.

[0214] The Inventors discovered that the polypeptides Dif183, Dif192, and Dif153 were secreted and present in the supernatant derived from strain 630. In addition, the Inventors discovered that the following proteins were present in the supernatant of the 20291 strain: Dif183, Dif192, and Dif153 and the fragments Dif208A and Dif208B. These results are summarized in FIG. 2. These secreted proteins/polypeptides are useful vaccine targets particularly for use in the reduction or prevention of bacterial colonization or for use in reducing tissue damage such as necrosis at the site of infection.

### Example 3

### Analysis of the Cell Lysate by NMR

[0215] Bacterial cells carrying vectors for recombinant protein expression were initially washed by resuspension in 800 uL M9 1× buffer, pH 7.4, centrifuged (5′ at 3,000 rpm), and supernatant discarded. The remaining bacterial pellet is then resuspended in 600 uL M9 buffer, cells are lysed by means of sonication, and then centrifuged at 4° C. (20′ @14,000 rpm). The supernatant is then isolated for NMR analysis. 10% D20 (by volume) is added to the sample for NMR analysis. Fast HSQC or TROSY experiments were acquired using a 900 or 800 MHz NMR and processed using by topspin software (FIG. 3).

[0216] From the NMR analysis, the HSQC spectra for Dif44 showed a good dispersion of the pics with roughly equal intensity in FIG. 4 indicating that Dif44 is well folded. The results for the NMR analysis of the cell lysate are summarized in FIG. 2. These results identified polypeptides having the propensity to stably maintain their three dimensional structure particularly when expressed in a heterologous environment such as the Escherichia coli cytoplasm—a useful feature for the provision of a recombinant, sub-unit vaccine component.

### Example 4

### Cloning, Expression, Purification of Recombinant Proteins and Fragments

[0217] To prepare isolated, recombinant proteins, Clostridium difficile ORFs were PCR-amplified using specific oligonucleotides and C. difficile chromosomal DNA as template. The primers used for the gene amplications are summarized in FIG. 1. Resulting PCR products were cloned in pET15b (Novagen) using the PIPE method (Klock, H. E., et al. (2008). Proteins 71:982-994), consisting in the PCR amplification of the cloning vector (V-PCR) and in the PCR amplification of the insert (I-PCR).Then, 1 μl of V-PCR and 1 μl of I-PCR are mixed and transformed in chemically competent HK100 cells (Klock, H. E., et al. (2005) J. Struct. Funct. Genomics 6, 89-94}. I-PCR reactions were set up containing 1 μM each of the forward and reverse primers, 1× Cloned Pfu DNA Polymerase Reaction Buffer, 2.5 units of Pfu Turbo DNA polymerase (Stratagene), 200 μM of each dNTP (Invitrogen) and 50 ng of genomic DNA template. The reactions were conducted as follows: initial denaturation for 2 min at 95° C., then 25 cycles of 95° C. for 30 s, 55° C. for 45 s, and 68° C. for 3 min followed by a final cool down to 4° C. V-PCR reactions were identical to the I-PCR reactions but the steps at 68° C. were lasting 14 min and 2 ng of pET15b plasmid were used as DNA template. Correct transformants where selected by PCR screening and DNA plasmid sequencing of the vector-insert junctions. The correct plasmid were then prepared from selected HK100 clones and used to transform BL21(DE3)T1^{r} cells (Sigma) in order to allow protein expression.

[0218] To express cloned proteins, BL21(DE3)T1^{r} clones containing pET15b constructs were grown in LB medium containing 100 μg/ml Ampicilin at 37° C. until OD₆₀₀=0.5. Protein expression was then induced by adding 1 mM IPTG and growing at the same temperature for additional 3 hrs. Conventional protein extractions and SDS-Page were performed to check protein expression.

### Example 5

### Immunization of Mice with C. difficile Recombinant Proteins and Fragments

[0219] For each polypeptide and fragment described in FIG. 1, two groups of 4 female CD1 mice were used. Each group was immunised with 10 μg of antigen, formulated in Alum adjuvant (group 1) or MF59 adjuvant. Immunisations were performed intra-peritoneally at days 0, 21, and 35. Final bleeding and culling was performed at day 49. Sera against recombinant polypeptides were used in characterizing the polypeptides of the invention by Western Blot, confocal microscopy and FACS analysis described below. The sera was also utilised in passive protection experiments to identify which polypeptides were most suitable for use in the preparation of neutralising antibodies.

### Example 6

### Surface-Exposure Studies by Western Blot

[0220] In order to demonstrate that the selected proteins are surface-expressed by C. difficile cells, sera raised against each recombinant protein were used in different screenings. Western blot analysis on bacterial fractions was performed to verify the presence of the polypeptides of the invention in S-layer fractions (containing non-covalently anchored proteins of the cell wall) and in total cell wall extracts (containing all proteins of the cell wall); purified proteins were used as positive control of sera specificity. C. difficile 630 strain was grown overnight in BHI medium and harvested by centrifugation for preparation of S-layer and total cell wall extracts. S-layer extracts were prepared using low pH glycine incubation; briefly, bacterial pellet was incubated with 0.2 M-glycine, pH2.2 and protease inhibitors at room temperature for 20 min. The bacterial suspension was centrifuged and the supernatant containing the surface proteins was neutralized by addition of 2 M Tris base.

[0221] Total cell wall extracts were prepared by incubation of bacteria with 60 μg/ml mutanolysin, 1 mg/ml lysozyme and protease inhibitors at room temperature for 2 hours. The bacterial suspension was centrifuged and the supernatant containing the surface proteins was collected. Proteins in the S-layer and cell wall extracts were subjected to SDS-PAGE and western blotting. All mouse sera raised against each recombinant protein were used at 1/1000 dilution, followed by anti-mouse-HRP at 1/2500 dilution.

[0222] Analysis of Dif183 and Preparation of C. difficile cell fractions: To prepare a “total cell extract”, strain 630 was grown in TYM to OD600 1,3. Cells were harvested by centrifugation at 4000 rpm for 10 minutes and washed once in PBS. The pellet was resuspended in PBS. In order to isolate the “cell wall fraction”, containing the S-layer proteins together with other proteins that are present within the cell wall, strain 630 was grown in 20 ml of TYM broth to OD600 1,3. Cells were harvested by centrifugation at 4000 rpm for 10 minutes at 4° C. and washed once in PBS and once in Tris-sucrose buffer (10 mM Tris-HCl pH6.9, 10 mM MgCl2, 0.5 M sucrose). The pellet was then incubated in 2 ml digestion buffer (Tris-sucrose buffer with 250 μg/ml mutanolysin and protease inhibitors) for 2 h at 37° C. with gentle rotating agitation. The reaction supernatant, containing the “cell wall fraction”, was separated by centrifugation from the pellet, containing the “protoplast fraction”. Protoplasts were resuspended in PBS and lysis was carried out by freeze-thawing the sample 5 times.

[0223] For preparation of the “S-layer fraction”, containing only proteins associated to the S-layer, strain 630 was grown in 50 ml of BHIS broth overnight. Cells were separated from the medium by centrifugation at 3500 g for 10 minutes at room temperature, washed in PBS and incubated in 0.5 ml of 0.2 M HCl, pH 2.2 for 20 min at room temperature with gentle agitation, in the presence of protease inhibitors. The bacterial suspension was centrifuged at maximum speed at 4° C. for 10 min. The supernatant, containing the S-layer proteins, was removed and the pH neutralized by addition of 2 M Tris base. For western blot analysis, fractions were normalized based on the starting culture volume.

### Western Blot Analysis:

[0224] For protein analysis of whole-cell lysates, cell fractions, supernatant fractions and purified recombinant proteins, the samples were mixed with sample buffer containing reducing agent and heated for 10 min at 100° C. prior to loading. The samples were separated by SDS-PAGE using the NuPAGE Gel System (Invitrogen) and transferred onto nitrocellulose membranes for Western blot analysis. The membranes were blocked 3 hours with PBS-10% milk powder at 4° C. Primary antibodies used are polyclonal mouse antisera raised against recombinant his-tagged proteins. All the primary antibodies were diluted 1:1000 and incubated 1 h and 30 min at 37° C.; the secondary antibody was goat anti-mouse serum conjugated to horseradish peroxidase (1:5000; Dako) and was incubated at room temperature for 45 min. Detection of bound antibodies was carried out with Super Signal Chemiluminescent Substrate (Pierce) following the manufacturer's instructions.

[0225] The polypeptides Dif44, Dif51 and Dif192, recognized by the sera as shown, are cell surface exposed and accessible to the immune system of a subject and these antigens therefore also represent useful vaccine targets, particularly for the prevention of infection, reducing colonization or spread of infection (FIG. 5).

### Example 6A

### Surface-Exposure Determination by Confocal Microscopy

[0226] In order to determine if selected proteins are surface-expressed by C. difficile cells, sera raised against each recombinant protein were used in further screenings. Confocal microscopy on fixed bacteria was performed to evaluate the accessibility of specific antibodies to each predicted exposed protein. Bacterial DNA was labeled with blue-fluorescent DAPI; surface proteins were stained with specific sera followed by secondary antibodies conjugated to a red or green dye.

[0227] To verify the surface exposure of each selected polypeptide, C. difficile 630 strain was grown in BHI up to OD₆₀₀ 0.5 and washed in PBS. Bacterial pellets were fixed with 2% PFA for 20 min at room temperature and spotted on chamber slides coated with poly-lysine. Bacteria were then blocked with 2% BSA for 15 min and incubated with sera raised against each recombinant protein diluted 1/500 in 2% BSA for 1 hour at room temperature. Bacteria were then stained with goat anti-mouse Alexa Fluor 568 conjugated antibodies (Molecular Probes) for 30 min at RT. Gold antifade reagent with DAPI (Molecular Probes) was then used to mount cover slips.

[0228] The inventors found that sera raised against Dif44, Dif51, Dif153, Dif183, Dif192, Dif208, and Dif232 were able to recognize these proteins on the surface of the 630 strain. FIG. 2 in the column entitled confocal microscopy shows the proteins which are surface exposed and detected in C. difficile 630 strain extracts. Again, these antigens which may be cell surface exposed and accessible to the immune system represent useful vaccine targets.

### Example 7

### Interaction with Human Epithelial Cells

[0229] To evaluate whether selected polypeptides were able to bind to human epithelial cells, each recombinant polypeptides was tested in two binding assays:

1. FACS analysis: Vero cells were non-enzymatically detached using cell dissociation solution (CDS, Sigma), harvested and suspended in RPMI medium supplemented with 1% FBS. Approximately 10⁵ cells were placed in 96-well microplates and mixed with different concentrations of purified proteins ranging from 500 to 0.24 mg/mL or medium alone for 1 h at 37° C. or at 4° C., mixing every 20 minutes to avoid the attachment of cells. Excess of unbound proteins was removed by washing twice with PBS+2% FBS and centrifugating. Cells were subsequently incubated for 1 h at 4° C. with sera raised against each recombinant polypeptide. Cells were washed twice in PBS+2% FBS and incubated for 30 min at 4° C. with R-Phycoerythrin-conjugated anti-mouse IgG (Jackson ImmunoResearch Laboratories). Cells were subsequently washed in PBS+2% FBS and resuspended in PBS. The inventors found that Dif208A, Dif208B, Dif232, and Dif192 had the ability to bind to the surface of Vero cells. As example, the FACS analysis of Dif232 is shown in FIG. 6 and all the results of the FACS analysis are summarized in FIG. 7. The polypeptides which bind to human cells may be good candidates for limiting or preventing the colonization of C. difficile.
2. Confocal microscopy: Vero and Caco-2 cells were seeded on chamber slides in DMEM medium supplemented with 10% FCS and incubated for 24 h. Cells were incubated with 20 mg/mL of each polypeptide diluted in DMEM+10% FCS for 1 h at 37° C. Excess unbound polypeptides were removed by two washings in PBS+2% BSA and cells were fixed with 2% PFA for 20 min at room temperature. Cells were then blocked with PBS+2% BSA for 15 min and incubated with sera raised against each recombinant protein diluted 1/500 in PBS+2% BSA for 1 hour at room temperature. Polypeptides were then stained with anti-mouse Alexa Fluor 488 conjugated antibodies (Molecular Probes) and cellular actin was stained with phalloidin-Alexa Fluor 568 conjugated. Gold antifade reagent with DAPI (Molecular Probes) was then used to mount cover slips.

[0230] In order to confirm the FACS results, the polypeptides which were positive for the FACS were tested by confocal microscopy binding assay on Vero cells. Moreover, the analysis was extended to human intestinal Caco-2 cells. The polypeptides which bind to human cells may be good candidates for limiting or preventing the colonization of C. difficile. The inventors demonstrated that Dif208B, Dif51 and Dif192 were clearly bound to the cell membrane whereas Dif208A was potentially associated to the cell membrane (FIG. 7). These polypeptides have been demonstrated to bind to human cells and they may be good candidates for limiting or preventing the colonization of C. difficile.

### Example 8

### Interaction to Extracellular Matrix (ECM) Components

[0231] Plates were coated with 10 μg/ml of each ECM component and incubated 0/N at 4° C. Plates were then washed and blocked with 2.7% for 2 hours at 37° C. After washing, plates were stored at 4° C. for at least 16 hours. 20-50 μg/ml of recombinant polypeptide were added to coated wells and incubated for 2 hours at 37° C.

[0232] Wells were washed and incubated with sera raised against each recombinant protein for 90 min at 37° C., followed by incubation with the HRP-conjugated secondary antibody for 90 min at 37° C. HRP substrate solution was added to the wells and the reactions stopped by adding 12.5% H₂SO₄. Plates were read at 490 nm by an ELISA plate reader.

[0233] The polypeptides which are able to bind to extracellular components may be good candidates for limiting or preventing the colonization of the intestine tissue. For example, Dif208 polypeptide contains an extracellular matrix-binding domain. To verify whether these domains were functional in mediating the binding to specific ECM components, the inventors have performed ELISA studies. ELISA plates were coated with purified ECM components and incubated with serially diluted recombinant proteins ranging from 2 ug to 31.25 ng/well. Two subdomains of Dif208 protein (Dif208A and Dif 208B) were analyzed in this study. The inventors have discovered that Dif208 sub-domains bind to all the ECM components (FIG. 9). These polypeptides are able to bind to extracellular components and may be good candidates for limiting or preventing the colonization of the intestine tissue.

### Example 9

### Conservation of Dif192, and Dif44 in C. difficile Clinical Isolates

[0234] The presence of Dif192, and Dif44 were studied by Western blot analysis of total cell extracts or S-layer preparations of the C. difficile strains 630 (ribotype 012), R20291 (ribotype 027), and M120 (ribotype 078) and C. difficile clinical isolates representing 6 of the prevailing PCR-ribotypes (001, 014, 018, 012, 078, 126) from different regions of Italy (FIG. 8). The preparation of whole cell lysates was obtained by a method based on the freeze-thaw procedure described by Fagan and Fairweather (Fagan, R., and Fairweather, N. J Biol Chem. 286(31):27483-93, 2011). Briefly, cultures of C. difficile were harvested by centrifugation at 5,000×g for 10 min at 4° C. and the pellets frozen at −20° C. Bacteria were thawed, resuspended in PBS to an OD_{600 nm} of 20 and incubated at 37° C. for 10 min. Three such freeze-thaw cycles were carried out in order to obtain consistent and reproducible lysis. The extraction of S-layer was performed following a previously described method (Fagan, R., and Fairweather, N. Methods Mol Biol 646, 117-134, 2010).

[0235] Cell wall proteins were prepared from cultures grown in BHI broth to stationary phase (OD_{600 nm}≈1). Extracts were separated by SDS-PAGE, followed by Western blotting with specific antibodies raised in mice. Primary antibodies were used at the dilution 1:2,000 and detected by using horseradish peroxidase-conjugated rabbit anti-mouse antibody at 1:20,000 (Dako) and the SuperSignal West Pico chemiluminescent substrate (Thermo Scientific Pierce). A marker for direct visualization of standard bands (MagicMark XP Western Protein Standard, Invitrogen) was used routinely for protein molecular weight estimation directly on Western blots. Expression of Dif 192 and Dif44 was detected in total extracts of all the clinical isolates analysed and indicating that these polypeptides are conserved and these polypeptides therefore also represent useful vaccine targets, particularly for the prevention of infection, reducing colonization or spread of infection.

### Example 10

### Recognition of Recombinant Polypeptides by Mouse Antibodies

[0236] To identify further surface and secreted proteins that are important in clostridial pathogenesis and able to elicit an antibody response in vivo, the inventors performed further analysis of culture supernatants, again prepared from the 630 clinical strain. There was no detectable cell lysis (data not shown).

Immunization of Mice with Concentrated Supernatant:

[0237] To obtain the “anti-supernatant” serum, C. difficile 630 was grown in medium CDMM (Karasawa et al, 1995) performing two serial dilutions. A final culture with OD₆₀₀ 0.5 was obtained. The medium was separated from the bacteria by centrifugation followed by filtration through 0.22 μm filters, and the proteins contained in it were concentrated using Vivaspin centrifugal concentrators MWCO 5000 Da (Sigma). The resulting protein concentration was estimated with the bicinchoninic acid assay (Pierce, Rockford, Ill., USA). Eight mice were immunized with 20 μg of proteins per dose and the resulting sera were pooled to be used in western analysis.

### Western Blot Analysis:

[0238] 50 ng amount of each recombinant protein was loaded on a NuPAGE Gel and western blot analysis was carried out as followed, using as a primary antibody serum of mice immunized with concentrated supernatant. The samples containing purified recombinant proteins were mixed with sample buffer containing reducing agent and heated for 10 min at 100° C. prior to loading. The samples were separated by SDS-PAGE using the NuPAGE Gel System (Invitrogen) and transferred onto nitrocellulose membranes for Western blot analysis. The membranes were blocked 3 hours with PBS-10% milk powder at 4° C. Primary antibodies used are polyclonal mouse antisera raised against recombinant his-tagged proteins. All the primary antibodies were diluted 1:1000 and incubated 1 h and 30 min at 37° C.; the secondary antibody was goat anti-mouse serum conjugated to horseradish peroxidase (1:5000; Dako) and was incubated at room temperature for 45 min. Detection of bound antibodies was carried out with Super Signal Chemiluminescent Substrate (Pierce) following the manufacturer's instructions.

[0239] To prove that the selected surface-exposed polypeptides were able to elicit an antibody response in vivo, the presence of specific antibodies in the sera from mice was analyzed. Purified polypeptides were analyzed by Western blotting using sera from mice immunized with concentrated supernatants. Mice sera immunized with supernatant of C. difficile bacteria contains antibodies against able to recognize C. difficile recombinant polypeptides and fragments. Purified polypeptides and fragments of Dif183 were clearly detected by antibodies confirming the accessibility of these proteins during the infection and their suitability as vaccine targets (FIG. 14).

### Example 11

### Recognition of Recombinant Polypeptides by Hamster Antibodies

[0240] 100 ng of each recombinant protein were subjected to SDS-PAGE and western blotting. Membranes were incubated with hamster sera at 1/200 dilution, followed by anti-mouse-HRP at 1/10.000 dilution. Sera were taken at: a) 15 days after the challenge from vaccinated hamsters; b) 30-50 hours after the challenge from unvaccinated hamsters. Serum from uninfected hamster was used as negative control. To prove that the selected surface-exposed polypeptides were able to elicit an antibody response in vivo, the presence of specific antibodies in the sera from infected hamsters was analyzed. Purified polypeptides were analyzed by Western blotting using sera from infected hamsters and from infected hamsters following the vaccination with A and B toxin combination.

[0241] Sera from infected hamsters were found to contain few antibodies against C. difficile polypeptides. This is primarily because infected hamsters die 30-50 hours after the infection—insufficient time to build an immune response against the bacterium. Therefore, polypeptides for which antibodies are present in these sera appear to be particularly useful for use in vaccine compositions and in the preparation of neutralizing antibodies.

[0242] Sera from hamsters that were vaccinated and subsequently infected contained antibodies able to recognize purified polypeptides. Immunization with a toxin combination (p5/6+toxB_GT) prior to infection enabled hamsters to generate an efficient antibody response preventing death but did not prevent colonization of C. difficile. Purified polypeptides and fragments were detected by antibodies present in the hamster sera from vaccinated and infected hamsters, confirming the surface accessibility of these proteins during the infection and their suitability as vaccine targets. Serum from uninfected hamster was used as negative control. For example, sera from hamstersvaccinated and subsequently infected contained antibodies able to recognize Dif44, Dif51, Dif130, Dif153, Dif183, Dif208, and Dif232 in the hamster sera from vaccinated and infected hamsters, confirming the surface accessibility of these proteins during the infection and their suitability as vaccine targets (FIG. 10).

[0243] Serum from uninfected hamster was used as negative control (FIG. 10B). Some bands were seen due to cross-reactions to E. coli contaminants present in the recombinant proteins preparations.

### Example 12

### Recognition by Antibodies from Human Sera (IgA and IgG)

[0244] In order to test recognition of recombinant polypeptides by human antibodies, the Inventors prepared and utilised a protein chip array.

1. Protein microarray procedures: The C. difficile protein array was generated by spotting purified recombinant proteins (0.5 mg/ml) in 4 replicates on nitrocellulose-coated slides (FAST slides, Schleicher and Schuell) using the inkjet spotter Arrayjet (Arrayjet Limited), fitted with a piezoelectric inkjet print head carrying more than 100 nozzles, resulting in spots of approximately 90-100 μm in diameter. As experimental controls, 4 curve replicates of biotinylated BSA, mouse IgG(s), human IgG(s) and human IgM(s) (from 0.004 to 0.5 mg/ml) were spotted on the arrays. PBS buffer was spotted in at least twice the number of the protein spots, and used to detect non-specific signals due to cross contamination during spotting. Fewer than 5% of the PBS spots showed signal intensity higher than the background value +3 Standard Deviation values.

[0245] Non-specific binding was minimised by pre-incubating arrays with a blocking solution containing 3% Top Block (Fluka-BioChemiKa)-0.1% Tween 20 in PBS buffer (TPBS). After washing with TPBS, human sera were diluted in 3% Top Block—TPBS and overlaid on the arrays at 25° C. for 1 h. After washing with TPBS, binding of antibodies to antigens printed on the arrays was detected by incubating the arrays with anti-human-Cy5 conjugated secondary antibodies (1:800) at 25° C. for 1 h. All incubation steps were conducted under agitation using the HS 4800 hybridization station (TECAN). Image fluorescence signals were detected with a PowerScannner3.5 scanner (TECAN) and the 16-bit images were generated with ScanArray™ software at 10 □m per pixel resolution and spot Fluorescence Intensities (FI) were determined using ImaGene 6.0 software (Biodiscovery Inc, CA, USA). Elaboration and analysis was performed using in house-developed software. For each protein, the mean fluorescence intensity (MFI) of replicated spots was determined, after subtraction of the background value surrounding each spot. Signals were considered as positive when their MFI value was higher than 2,000 for the experiments with IgG and 1000 for the experiments with IgA, corresponding to the mean fluorescence intensity (MFI) of protein spots after detection with anti-human-Cy5 antibodies alone, plus 3 standard deviation values. Two controls where added: NN-His corresponding to MFI values of spots with cell extract of E. coli carrying an empty expression vector and PBS_Gly coerresponding to MFI values of spots containing only buffer (background values). These values are automatically subtracted by the software from the value of each sample spot.

2. Western Blot analysis: Two hundred ng (200 ng) of each purified recombinant protein were loaded onto 1-mm 12-wells 4-12% Novex Bis-Tris NuPAGE pre-cast gels (Invitrogen), separated at 200 V for 35 min and transferred onto nitrocellulose membranes using the dry system iBlot (Invitrogen). The membranes were saturated with 10% Skim Milk (Difco) in PBS-T (PBS containing 0.05% Tween-20) and incubated for 1 h at RT with gentle agitation. The blocked membranes were then incubated with the human serum 4705WH diluted 1:500 in 1% Skim Milk PBS-T and incubated 3 h at RT. The membranes were washed with PBS-T once for 15 min and twice for 5 min.

[0246] The secondary anti-human IgG antibodies, HRP-conjugated SIGMA A-6029 (1:2,500 in 1% Skim Milk PBS-T) or anti-human IgA, Alkaline phosphatase-conjugated SIGMA A-9669 (1:3000 in 1% Skim Milk PBS-T) were then added and incubated for 40 min with gentle agitation. After one wash of 15 min and 3 washes of 5 min with PBS-T, the membranes were overlaid with the substrate SuperSignal WestPico (Pierce) solution and incubated for 5 min at RT with gentle agitation. The substrate in excess was removed with a paper towel and the membrane exposed to a radiographic film.

[0247] Human sera from convalescent donors (donor A, donor B, donor C, donor D, and donor E) and healthy donors (10WH, 3453WH, 4016BL, 4697WH and 4705WH) were obtained. The ELISA titers of the different sera are shown in FIG. 11. FGF21 is an unrelated protein which is a negative control and ToxA/B is a combination of Toxins A and B from Inverness Medical Inc. The sera from the convalescent donors, donor A, donor C and donor D have IgG against ToxA and Tox B compared to the IgG titer for FGF21 indicating that have mounted an immune response against C. difficile.

[0248] Furthermore, the sera from the healthy donors 10WH and 4705WH have high IgG titers against ToxA and Tox B compared to the IgG titer for FGF21 indicating that they have been infected in the past and have previously mounted an immune response against C. difficile (FIG. 11).

[0249] The presence of specific IgG in the sera is associated to an IgG systemic immune response against C. difficile. Using the protein array, the presence of specific IgG against the polypeptides in the human sera was identified. For example, using the protein array, the Inventors identified the presence of specific IgG against the Dif51, Dif130, Dif232 polypeptides in the human sera mentioned above. High titers of IgG (MFI>5000) against Dif232 polypeptide have been measured in the serum named 4705WH (FIG. 12A). The presence in the serum named 4705WH of IgG against Dif232 was confirmed by Western Blot (FIG. 12B).

[0250] The polypeptides which show a strong reaction may be particularly useful in an immunogenic or vaccine composition particularly for use in humans. Furthermore the detection of specific IgA in the sera is associated to a mucosal immune response against C. difficile. The presence of specific IgA against the polypeptides of the invention in the human sera was determined. For example, the Inventors identified the presence of specific IgA against the Dif51, polypeptide in the human sera (summarized below and in FIG. 13A).

[0251] A titer of IgA (MFI>1000) against Dif51 polypeptide was measured in the serum named donor C. A titer of IgA (MFI>1000) against Dif130 polypeptides was measured in the sera named donor A, donor C, donor D, 3453WH and 4705WH. The polypeptides which show a strong reaction may be particularly useful in an immunogenic or vaccine composition for generating a mucosal immune response providing protection directed to an organism's various mucous membranes. This is particularly the case for C. difficile where infection may be limited to the colonic mucosa. The presence of IgA against Dif130 and Dif232 polypeptide in the serum 4705WH was confirmed by Western Blot (FIG. 13B). These polypeptides may be particularly useful in an immunogenic or vaccine composition for generating a mucosal immune response providing protection directed to an organism's various mucous membranes. This is particularly the case for C. difficile where infection may be limited to the colonic mucosa. Table 2 summarizes the polypeptides that were recognised by human sera (4705 WH) in protein chip and western blot analysis.

| Name | Annotation | Predicted Location |
|---|---|---|
| Dif130 | Bacterial extracellular solute-binding | Lipoprotein |
| | protein | |
| Dif232 | Putative cell wall anchored protein | LPXTG-like motif |

### Example 13

### Further Analysis of Dif153 (CD2830)

[0252] Dif153 has been detected in the surnatant of 630 and Stoke Mandeville strain. Dif153 is annotated as a hypothetical protein of 220 aminoacids. BLAST analysis showed homology to Anthrax Lethal Factor proteins (LF), a family of zinc metallopeptidases. In particular, Dif153 shows homology to the C-terminal domain (residues 589-810) of the Anthrax lethal factor. The N-terminal domain of Anthrax, necessary for interaction with the Protective Antigen, is missing. The catalytic site (HEXXH) is conserved in Dif153 suggesting the C. difficile protein might be a zinc-dependent metalloprotease (FIG. 15). To understand if this protein is able to bind Zinc or other divalent cations, NMR analysis was performed using a recombinant protein. This analysis revealed the ability of the recombinant protein to bind zinc, nickel and copper but not calcium.

[0253] To investigate if Dif153 has a proteolytic activity, a fluorimetric analysis was carried out to test the ability of the recombinant protein to cleave a gelatin substrate (FIG. 18). This analysis showed that the recombinant protein has a weak gelatinase/collagenase activity in the presence of zinc, but not in the presence of nickel and copper or in the apo form. It has been reported that Clostridia secrete several metallopeptidases that are responsible for the digestion of extracellular matrix components. Therefore, the inventors tested in vitro the proteolytic activity of the recombinant protein on several extracellular matrix elements (collagen I-VI and fibronectin). A preliminary analysis showed that the recombinant protein is able to cut fibronectin (FIG. 16).

[0254] Further characterisation of Dif153 was performed as follows: The proteolytic activity on other extracellular matrix elements is assessed, and the cleavage site is identified by mass spec sequencing of fibronectin fragments. In vitro assays are performed to understand if the protein has a toxic effect on human cells. In vitro assays are performed to understand if the protein has an effect on the organization of the fibronectin matrix of human cells. Confirmation that the observed enzymatic activity is specific for Dif153 is achieved by generating an inactive recombinant protein mutated in the catalytic site. This polypeptide which is a new zinc-metellopeptidase with fibronectin-degradating activity may be a good candidate for limiting or preventing the colonization of C. difficile.

### Example 14

### Further Analysis of Dif183

[0255] To characterize the function of Dif183 (CD3669), a deletion mutant was generated. The subcellular localization of Dif183 was investigated by confocal microscopy on vegetative cells and by western blot analysis on cellular fractions. The method is described in Example 6. These analyses showed that Dif183 is associated to the bacterial surface (FIG. 19).

[0256] The presence of Dif183 in culture supernatants (collected both in exponential phase and after 48 hours of stationary phase) was confirmed by Western blotting. Moreover, immunoblotting analysis revealed that it is not only on the total supernatant, but also in ultracentrifugation fractions. After 48 hours of stationary phase the inventors detected the protein both in the ultracentrifugation supernatant and in the ultracentrifugation pellet. This observation could indicate an association of the protein with macromolecular structures (flagella, vesicles) that were previously observed in supernatants pellets by electron microscopy (FIG. 20).

[0257] To investigate the function of Dif183, growth curve of the deletion mutant in rich medium was compared to the wild type. Vital counts of both vegetative cells and spores were performed (FIG. 21). While in exponential phase the mutant has a growth profile comparable to the wt (FIG. 21A), optical density of the mutant strain decreases faster during the late stationary phase (FIG. 21B). Vital counts of vegetative cells did not show a difference between wt and mutant (FIG. 21C). On the contrary, vital counts of mutant spores after ETOH inactivation of vegetative cells were about 10 fold less than the wt (FIG. 21D). This phenotype can be associated to a defect in one or more biological processes, such as formation of the spore, resistance of spores to ethanol treatment or germination of spores.

[0258] Further characterisaiton of Dif183 is performed. A Dif183 complemented strain is generated to confirm the specificity of the phenotype observed. Protein expression is tested at different timepoints of growth and in spore extracts. It is determined whether the phenotype is associated with a sporulation or germination defect (spore count, germination assays). The effect of wild type and knock out supernatants are tested on spore germination. Electron microscopy analysis is performed on knock out and wild type on vegetative cells and spores. This polypeptide which is a new sporulation/germination factor may be a good candidate for limiting or preventing the colonization of C. difficile.

[0259] From over 3700 potential targets, the Inventors have used a combination of techniques to identify various polypeptides with potentially significant utility in C. difficile infection. The SEQ ID NOs and DIF identifier for each of these polypeptides is shown in FIG. 1 and the predicted localization of these polypeptides is summarized in FIG. 2.

### Example 15

### Combination of toxB_GT and TcdA Fragments with Polypeptide Antigens

[0260] Hamster immunisation studies typically involved Golden Syrian hamsters. Antigens were tested by systemic immunisations (on 4 occasions separated by two weeks). Differences in time to death, signs of infection and colonisation of bacteria were tested.

[0261] Female Golden Syrian hamsters (100 g weight) were purchased from Harlan Olac, UK. The animals were housed individually and given water and food ad libitum. Telemetry chips (Vitalview Emitter) were inserted i.p. by laparotomy at least 3 weeks before the first vaccination. Once the wounds healed, the animals were placed on receiver pads, and the body temperature and activity were monitored (Vital View software). Animals were immunized via intra peritoneal (i.p.) with four doses of antigen combinations (50 ugr of p5-6 and toxB_GT with either 20 μg of the anti-colonisation antigens Dif044 or DIF208) formulated in MF59 adjuvant at days 1, 14, 28 and 36. All components were stored correctly and were subject to minimal freeze/thaw cycles.

[0262] To ensure the sensitivity of each animal to colonization, on day 60 each were treated with 30 mg/kg of clindamycin phosphate. After 12 hours following administration of the antibiotic, each hamster was challenged with approximately 1000 spores of C. difficile 630.

[0263] Following challenge, animals were closely monitored for signs of infection including onset and duration of loose stools (wet tail). As previously reported, animals showing drop of body temperature of more than two degree (35° C.) were culled. Animals whose temperature failed to drop below 35° C. but that lost more than 10% of their body mass were also culled. Animals surviving for more than two weeks post challenge were considered to have recovered from the infection and were culled to provide an endpoint to the experiment.

1. Times to death: the time taken to reach 35° C. post challenge of the animals.

| | Strain | Time at cull | Clinical signs |
|---|---|---|---|
| H1 | P5/6 + toxB_GT + DIF044 | 14 days | None |
| H2 | P5/6 + toxB_GT + DIF044 | 14 days | None |
| H3 | P5/6 + toxB_GT + DIF044 | 14 days | None |
| H4 | P5/6 + toxB_GT + DIF044 | 14 days | None |
| H5 | P5/6 + toxB_GT + DIF044 | 14 days | None |
| H6 | P5/6 + toxB_GT + DIF208 | 14 days | None |
| H7 | P5/6 + toxB_GT + DIF208 | 14 days | None |
| H8 | P5/6 + toxB_GT + DIF208 | 14 days | None |
| H9 | P5/6 + toxB_GT + DIF208 | 14 days | None |
| H10 | P5/6 + toxB_GT + DIF208 | 14 days | None |

[0264] All animals survived challenge with 9.4×10⁴ spores/dose and none of the animals showed any clinical signs including diarrhoea. Faecal pellets were collected throughout to check for shedding of spores. This is in line with observations made (eg in WO2013/084071) for immunisation with P5/6+toxB_GT without the anti-colonisation antigens.

2. Body temperatures: All animals' temperatures were monitored by telemetry throughout the experiment. All animals showed normal diurnal temperature fluctuations, with no impact being observed in the first 48 h for animals 6-9. The telemetry chip in H10 was not working therefore no temperature data is available for this animal. Representative results are shown in FIG. 23.
3. Shedding of C. difficile spores in faeces of vaccinated animals: Faecal pellets were collected on various days after challenge. These were collected by either placing the animal into a new sterile cage or following replacement of soiled bedding with clean sterile bedding. Pellets were resuspended in sterile PBS and the number of C. difficile organisms recovered were enumerated by plating onto Braziers CCEY agar with erythromycin. The number of colonies per 100 mg faecal material was then determined. Results show that the initial shedding of C.difficile in animals vaccinated with the anti-colonisation factor antigens (DIF044 and DIF208) are similar to the levels shed in animals vaccinated with the toxin fragments alone (historical data from animals immunised with p5/6+tox GT). The levels of shedding in the anti-colonisation factor vaccinated animals drop between days 3 and 4 after challenge at a time when typically we have observed the levels of bacteria to increase in toxin fragment only immunised animals. By day 8 after challenge the levels of shedding in all groups of vaccinated animals are similar (FIG. 24).
4. C. difficile colonisation in the gut at endpoint: Numbers of C. difficile were enumerated localised in the lumen of the caecum (Cae-LA) and colon (Col-LA) and those associated with the tissue of these organs (Cae-TA and Col-TA). Guts were removed and bacterial counts on recovered bacteria determined. To enumerate the total bacterial load (spores and vegetative cells), each section was opened longitudinally, and the contents were removed by gentle washing in two changes of 10 ml PBS. Tissues were homogenized in 5 ml of PBS for 1 min using a Stomacher, and viable counts were determined for the homogenates. Serial 10-fold dilutions were plated on CCFA blood agar plates containing 20 g/ml amphotericin B to suppress yeast growth. To estimate the numbers of spores present in the samples, the samples were heated for 10 min at 56° C., and the numbers of spores present were determined by the viable count method. Microbiological analysis showed that H1, H4, H5 and H6 had no detectable C. difficile at the experimental endpoint. H8 and H10 had very low numbers of C. difficile with only a few colonies growing at the endpoint (FIG. 25). The average colonisation of the gut at endpoint was compared with results from the previous experiment with animals that were vaccinated with p5/6+toxB_GT alone (FIG. 26).

[0265] The number of C. difficile isolated was highest in all groups in the lumen of the colon. The numbers of bacteria associated with the lumen of both the caecum and colon were comparable in all vaccinated groups. The number of bacteria in groups vaccinated with the anti-colonisation antigens were lower associated with the tissue in the caecum. No bacteria were isolated from the group vaccinated with DIF044 associated with the tissue in the colon.

5. Toxin estimation in gut contents: Assessments of toxin content in the gut were also performed. Gut washes were filtered through a 0.22 μm filter to remove bacterial cells. Filtered washes were then placed on confluent Vero cells at 10-fold decreasing concentrations (5-fold for the colon) for 24 hours. After incubation, cells were washed, fixed, and then coloured with Giemsa stain. If toxin was present then cell rounding caused detachment and the absence of colour. Toxin-content data represents the dilutions at which the cells remained attached (stained). There was very little no active toxin present in any of the gut samples estimated by the addition of gut content samples onto either HT29 cells (susceptible to toxin A) or Vero cells (susceptible to toxin B) as shown in FIG. 27.
6. Antibody detection and gut washes sera: Sera or gut washes from hamsters were test for the measurement of anti toxin, anti Dif44 and anti Dif208 antibodies, by Western Blot. For this analysis 200 ng of each recombinant protein (p5-6, toxB_GT, Dif44 and Dif208) were separated by SDS-PAGE using the NuPAGE Gel System (Invitrogen) and transferred onto nitrocellulose membranes for Western blot analysis. The membranes were blocked 1 hour with PBS-10% milk powder at room temperature. The membranes were then incubated with either serum (dil 1:200) or gut washes (dil 1:10) from hamsters of Example 15 for 90 min at 37° C.: Particularly, sera or gut washes from hamsters 1-5 of Example 15 were employed to detect antiDi44 antibodies and sera or gut washes from hamsters 6-10 of Example 15 were employed to detect anti Dif44 antibodies. After incubation with anti-hamster secondary antibody (dil. 1:10,000) for 45 min at 37° C., the detection of bound antibodies was carried out with Super Signal Chemiluminescent Substrate (Pierce) following the manufacturer's instructions.

[0266] It can be seen from FIGS. 28 and 29 that anti Dif44 and anti Dif208 antibodies are present in serum and gut washes.

### Example 16

### Anti Dif44 Antibodies Recognise Other CWP Proteins

[0267] To determine if anti Dif44 antibodies could cross react with other cwp proteins, 200 ng of various samples were loaded onto a gel and subjected to Western Blot. Each recombinant cwp protein (listed in FIG. 30) were separated by SDS-PAGE using the NuPAGE Gel System (Invitrogen) and transferred onto nitrocellulose membranes for Western blot analysis.

| Gel 1 | | | | | |
|---|---|---|---|---|---|
| | | Internal | Gel 2 | | |
| Lane | Protein | name | Lane | Protein | Internal name |
| 1 | M | | 1 | M | |
| 2 | S-Layer extract | | 2 | cwp14 | dif139 |
| 3 | LMW 630 cwp1 | dif205A | 3 | cwp15 (V) | dif189A |
| 4 | LMW SM cwp1 | dif327A | 4 | cwp15 (V) | dif189B |
| 5 | HMW 630 | | 5 | cwp16 | dif192 |
| 6 | HMW SM | | 6 | cwp18 | dif53 |
| 7 | cwp3 | dif204 | 7 | cwp20 | dif75A |
| 8 | cwp5 | dif146 | 8 | cwp21 | dif211 |
| 9 | cwp6 | dif145 | 9 | cwp25 | dif44 |
| 10 | cwp7 | dif144 | 10 | cwp26 | dif195 |
| 11 | cwp10 | dif207 | 11 | cwp27 | dif187 |
| 12 | cwp11 | dif149 | 12 | cwp29 | dif201 |

[0268] The membranes were blocked 1 hour with PBS-10% milk powder at room temperature. The membranes were then incubated with serum from hamsters 1-5 of Example 15 (dil 1:200) for 90 min at 37° C. After incubation with anti-hamster secondary antibody (dil. 1:10,000) for 45 min at 37° C., the detection of bound antibodies was carried out with Super Signal Chemiluminescent Substrate (Pierce) following the manufacturer's instructions.

[0269] As shown in FIG. 30, serum antibodies recognised cwp1, cwp3, cwp6, cwp7, cwp11, cwp14, cwp20, cwp21, cwp25, cwp26, cwp27 and cwp29. The same samples were also incubated with the serum from hamsters vaccinated with p5_{—}6+ToxB-GT. Possible antibodies against cwp proteins present in this serum are due to immune response against the bacteria challenged after vaccination. A weak reactivity is detected only against cwp5, cwp25, cwp26, cwp29, demonstrating that the addition of dif44 in the vaccination confers an advantage in the response against C. difficile.

### Example 17

### Combination of ToxB-GT and P5_{—}6 Fragments with DIF44 and DIF208 Polypeptide Antigens

[0270] Immunogenic compositions are prepared as described above. Three compositions are administered as follows: 8 hamsters with ToxB_GT+P5_{—}6+DIF208+DIF44, 4 hamsters with ToxB_GT+P5_{—}6 (negative control), using the standard administration procedures described elsewhere. 6 of the 8 hamsters administered with ToxB_GT+P5_{—}6+DIF208+DIF44 were challenged with C. difficile, while 2 were left unchallenged. Differences in time to death, and colonisation of bacteria were tested in vivo. Because it has not previously been possible to determine whether antibodies to DIF 44 which were observed e.g. in the serum of immunized and challenged hamsters result from infection or the vaccination, western blots to observe the antibodies present in the serum and gut washed from the vaccinated but unchallenged hamsters are also carried out.

| | SEQ |
|---|---|
| Description | ID: |
| Full length TcdA | 1 |
| Full length TcdB | 2 |
| ToxA-ED | 3 |
| ToxA-GT | 4 |
| ToxA-CP | 5 |
| ToxA-T | 6 |
| ToxA-T4 | 7 |
| ToxA-B | 8 |
| ToxA-PTA2 | 9 |
| ToxA-P5-7 | 10 |
| ToxA-P5-6 | 11 |
| ToxA-P9-10 | 12 |
| ToxA-B2 | 13 |
| ToxA-B3 | 14 |
| ToxA-B5 | 15 |
| ToxA-B6 | 16 |
| ToxB-ED | 17 |
| ToxB-GT | 18 |
| ToxB-CP | 19 |
| ToxB-T | 20 |
| ToxB-B | 21 |
| ToxB-B2 | 22 |
| ToxB-B7 | 23 |
| B4 hybrid | 24 |
| Linker | 25 |
| Linker | 26 |
| Linker | 27 |
| IC-31 | 28 |
| Polycationic polymer | 29 |
| Full length TcdA | 30 |
| Full length TcdB | 31 |
| ToxA-ED | 32 |
| ToxA-GT | 33 |
| ToxA-CP | 34 |
| ToxA-T | 35 |
| ToxA-T4 | 36 |
| ToxA-B | 37 |
| ToxA-PTA2 | 38 |
| ToxA-P5-7 | 39 |
| ToxA-P5-6 | 40 |
| ToxA-P9-10 | 41 |
| ToxA-B2 | 42 |
| ToxA-B3 | 43 |
| ToxA-B5 | 44 |
| ToxA-B6 | 45 |
| ToxB-ED | 46 |
| ToxB-GT | 47 |
| ToxB-CP | 48 |
| ToxB-T | 49 |
| ToxB-B | 50 |
| ToxB-B2 | 51 |
| ToxB-B7 | 52 |
| B4 hybrid | 53 |
| ToxA-ED (peptide) | 54 |
| ToxA-ED (encoding | 55 |
| nucleic acid) | |
| ToxA-GT (peptide) | 56 |
| ToxA-GT (encoding | 57 |
| nucleic acid) | |
| ToxB-ED (peptide) | 58 |
| ToxB-ED (encoding | 59 |
| nucleic acid) | |
| ToxB-GT (peptide) | 60 |
| ToxB-GT (encoding | 61 |
| nucleic acid) | |
| ToxA-CP (peptide) | 62 |
| ToxA-CP (encoding | 63 |
| nucleic acid) | |
| ToxB-CP (peptide) | 64 |
| ToxB-CP (encoding | 65 |
| nucleic acid) | |
| ToxA-PTA2 (encoding | 66 |
| nucleic acid) | |
| ToxA-P9-10 (encoding | 67 |
| nucleic acid) | |
| ToxB-B (encoding nucleic | 68 |
| acid) | |
| ToxB-B2 (encoding | 69 |
| nucleic acid) | |
| Dif14_CD0237 | 70 |
| Dif14_CD0237 | 71 |
| Dif15_CD0239 | 72 |
| Dif15_CD0239 | 73 |
| Dif16_CD0300 | 74 |
| Dif16_CD0300 | 75 |
| Dif40_CD0755 | 76 |
| Dif40_CD0755 | 77 |
| Dif44_CD0844 | 78 |
| Dif44_CD0844 | 79 |
| Dif51_CD0999 | 80 |
| Dif51_CD0999 | 81 |
| Dif55_CD1135 | 82 |
| Dif55_CD1135 | 83 |
| Dif104_CD2177 | 84 |
| Dif104_CD2177 | 85 |
| Dif109A_f1-539_CD2247 | 86 |
| Dif109A_f1-539_CD2247 | 87 |
| Dif109B_f541- | 88 |
| 1132_CD2247 | |
| Dif109B_f541- | 89 |
| 1132_CD2247 | |
| Dif114_CD2365 | 90 |
| Dif114_CD2365 | 91 |
| Dif130_CD2645 | 92 |
| Dif130_CD2645 | 93 |
| Dif144_CD2782 | 94 |
| Dif144_CD2782 | 95 |
| Dif171A_f22-568_CD3392 | 96 |
| Dif171A_f22-568_CD3392 | 97 |
| Dif171B_f561-976_CD3392 | 98 |
| Dif171B_f561-976_CD3392 | 99 |
| Dif189A_f28-498_CD0514 | 100 |
| Dif189A_f28-498_CD0514 | 101 |
| Dif189B_f521-1622_CD0514 | 102 |
| Dif189B_f521-1622_CD0514 | 103 |
| Dif192_CD1035 | 104 |
| Dif192_CD1035 | 105 |
| Dif194_CD1131 | 106 |
| Dif194_CD1131 | 107 |
| Dif201_CD2518 | 108 |
| Dif201_CD2518 | 109 |
| Dif208A_f32-480_CD2831 | 110 |
| Dif208A_f32-480_CD2831 | 111 |
| Dif208B_f481-938_CD2831 | 112 |
| Dif208B_f481-938_CD2831 | 113 |
| Dif210_CD3145 | 114 |
| Dif210_CD3145 | 115 |
| Dif211_CD3192 | 116 |
| Dif211_CD3192 | 117 |
| Dif212_CD3246 | 118 |
| Dif212_CD3246 | 119 |
| Dif225_CD0438 | 120 |
| Dif225_CD0438 | 121 |
| Dif231_CD1021 | 122 |
| Dif231_CD1021 | 123 |
| Dif232_CD1031 | 124 |
| Dif232_CD1031 | 125 |
| Dif109_CD2247 | 126 |
| Dif109_CD2247 | 127 |
| Dif171_CD3392 | 128 |
| Dif171_CD3392 | 129 |
| Dif189_CD0514 | 130 |
| Dif189_CD0514 | 131 |
| Dif208_CD2831 | 132 |
| Dif208_CD2831 | 133 |
| Dif16_CD0300 | 134 |
| Dif16_CD0300 | 135 |
| Dif40_CD0755 | 136 |
| Dif40_CD0755 | 137 |
| Dif44_CD0844 | 138 |
| Dif44_CD0844 | 139 |
| Dif51_CD0999 | 140 |
| Dif51_CD0999 | 141 |
| Dif55_CD1135 | 142 |
| Dif55_CD1135 | 143 |
| Dif104_CD2177 | 144 |
| Dif104_CD2177 | 145 |
| Dif109A_f1- | 146 |
| 539_CD2247 | |
| Dif109A_f1- | 147 |
| 539_CD2247 | |
| Dif109B_f541- | 148 |
| 1132_CD2247 | |
| Dif109B_f541- | 149 |
| 1132_CD2247 | |
| Dif114_CD2365 | 150 |
| Dif114_CD2365 | 151 |
| Dif130_CD2645 | 152 |
| Dif130_CD2645 | 153 |
| Dif144_CD2782 | 154 |
| Dif144_CD2782 | 155 |
| Dif171A_f22- | 156 |
| 568_CD3392 | |
| Dif171A_f22- | 157 |
| 568_CD3392 | |
| Dif171B_f561- | 158 |
| 976_CD3392 | |
| Dif171B_f561- | 159 |
| 976_CD3392 | |
| Dif189A_f28- | 160 |
| 98_CD0514 | |
| Dif189A_f28- | 161 |
| 498_CD0514 | |
| Dif189B_f521- | 162 |
| 1622_CD0514 | |
| Dif189B_f521- | 163 |
| 1622_CD0514 | |
| Dif192_CD1035 | 164 |
| Dif192_CD1035 | 165 |
| Dif194_CD1131 | 166 |
| Dif194_CD1131 | 167 |
| Dif201_CD2518 | 168 |
| Dif201_CD2518 | 169 |
| Dif208A_f32- | 170 |
| 480_CD2831 | |
| Dif208A_f32- | 171 |
| 480_CD2831 | |
| Dif208B_f481- | 172 |
| 938_CD2831 | |
| Dif208B_f481- | 173 |
| 938_CD2831 | |
| Dif210_CD3145 | 174 |
| Dif210_CD3145 | 175 |
| Dif211_CD3192 | 176 |
| Dif211_CD3192 | 177 |
| Dif212_CD3246 | 178 |
| Dif212_CD3246 | 179 |
| Dif225_CD0438 | 180 |
| Dif225_CD0438 | 181 |
| Dif231_CD1021 | 182 |
| Dif231_CD1021 | 183 |
| Dif232_CD1031 | 184 |
| Dif232_CD1031 | 185 |
| Dif183_CD3669 | 186 |
| Dif183_CD3669 | 187 |
| Dif183_CD3669 | 188 |
| Dif183_CD3669 | 189 |
| Dif14A_f1-278_CD0237 | 190 |
| Dif14B_f279-507_CD0237 | 191 |
| Dif207_CD2796 | 192 |
| Dif207_CD2796 | 193 |
| Dif207_CD2796 | 194 |
| Dif207_CD2796 | 195 |
| Dif207_CD2796, Reverse | 196 |
| complement, Length 25 | |
| Dif251_CD1858, primer Front, | 197 |
| Length 22 | |
| Dif251_CD1858, primer Reverse | 198 |
| complement, Length 24 | |
| Dif327A_CDR20291_2682, | 199 |
| primer Front, Length 16 | |
| Dif327A_CDR20291_2682, primer | 200 |
| Reverse complement, Length 25 | |
| dif14 (Forward Primer) | 201 |
| dif14 (Reverse Primer) | 202 |
| dif15 (Forward Primer) | 203 |
| dif15 (Reverse Primer) | 204 |
| dif16 (Forward Primer) | 205 |
| dif16 (Reverse Primer) | 206 |
| dif40 (Forward Primer) | 207 |
| dif40 (reverse Primer) | 208 |
| dif44 (Forward Primer) | 209 |
| dif44 (Reverse Primer) | 210 |
| dif55 (Forward Primer) | 211 |
| dif55 (Reverse Primer) | 212 |
| dif130 (Forward Primer) | 213 |
| dif130 (Reverse Primer) | 214 |
| dif144 (Forward Primer) | 215 |
| dif144 (ReversePrimer) | 216 |
| dif109f1-539 (Forward Primer) | 217 |
| dif109f1-539 (Reverse Primer) | 218 |
| dif109f541-1132 | 219 |
| (Forward Primer) | |
| dif109f541-1132 | 220 |
| (Reverse Primer) | |
| dif207 (Forward Primer) | 221 |
| dif207 (Reverse Primer) | 222 |
| dif208f32-480 (Forward | 223 |
| Primer) | |
| dif208f32-480 (Reverse | 224 |
| Primer) | |
| dif208f481-938 | 225 |
| (Forward Primer) | |
| dif208f481-938 | 226 |
| (Reverse Primer) | |
| dif210 (Forward Primer) | 227 |
| dif210 (Reverse Primer) | 228 |
| dif211 (Forward Primer) | 229 |
| dif211 (Reverse Primer) | 230 |
| dif212 (Forward Primer) | 231 |
| dif212 (Reverse Primer) | 232 |
| dif225 (Forward Primer) | 233 |
| dif225 (Reverse Primer) | 234 |
| dif231 (Forward Primer) | 235 |
| dif231 (Reverse Primer) | 236 |
| dif232 (Forward Primer) | 237 |
| dif232 (Reverse Primer) | 238 |
| dif171f22-568 (Forward | 239 |
| Primer) | |
| dif171f22-568 (Reverse | 240 |
| Primer) | |
| dif171f561-976 | 241 |
| (Forward Primer) | |
| dif171f561-976 | 242 |
| (Reverse Primer) | |
| dif189f28-498 (Forward | 243 |
| Primer) | |
| dif189f28-498 (Reverse | 244 |
| Primer) | |
| dif189f521-1622 | 245 |
| (Forward Primer) | |
| dif189f521-1622 | 246 |
| (Reverse Primer) | |
| dif192 (Forward Primer) | 247 |
| dif192 (Reverse Primer) | 248 |
| dif194 (Forward Primer) | 249 |
| dif194 (Reverse Primer) | 250 |
| dif201 (Forward Primer) | 251 |
| dif201 (Reverse Primer) | 252 |
| dif51 (Forward Primer) | 253 |
| dif51 (Reverse Primer) | 254 |
| dif104 (Forward Primer) | 255 |
| dif104 (Reverse Primer) | 256 |
| dif114 (Forward Primer) | 257 |
| dif114 (Reverse Primer) | 258 |
| Dif145_CD2784 | 259 |
| Dif145_CD2784 | 260 |
| Dif149_CD2795 | 261 |
| Dif149_CD2795 | 262 |
| Dif204_CD2789 | 263 |
| Dif204_CD2789 | 264 |
| Dif205_CD2793 | 265 |
| Dif205_CD2793 | 266 |
| Dif145_CD2784 | 267 |
| Dif145_CD2784 | 268 |
| Dif149_CD2795 | 269 |
| Dif149_CD2795 | 270 |
| Dif204_CD2789 | 271 |
| Dif204_CD2789 | 272 |
| Dif205_CD2793 | 273 |
| Dif205_CD2793 | 274 |
| Dif145_CD2784_primer | 275 |
| Front_Length 23 | |
| Dif145_CD2784_primer | 276 |
| Reverse complement_Length | |
| 26 | |
| Dif149_CD2795_primer Front_Length | 277 |
| 23 | |
| Dif149_CD2795_primer reverse | 278 |
| complement_Length 18 | |
| Dif204_CD2789_primer front_Length | 279 |
| 23 | |
| Dif204_CD2789_primer reverse | 280 |
| complement_Length 23 | |
| Dif205_CD2793_primer front_Length | 281 |
| 20 | |
| Dif205_CD2793_primer reverse | 282 |
| complement_Length 28 | |
| Dif12_CD0183 | 283 |
| Dif12_CD0183 | 284 |
| Dif52_CD1029 | 285 |
| Dif52_CD1029 | 286 |
| Dif53_CD1047 | 287 |
| Dif53_CD1047 | 288 |
| Dif75_CD1469 | 289 |
| Dif75_CD1469 | 290 |
| Dif75A_f30-715_CD1469 | 291 |
| Dif75A_f30-715_CD1469 | 292 |
| Dif75B_f715-1007_CD1469 | 293 |
| Dif75B_f715-1007_CD1469 | 294 |
| Dif106_CD2193 | 295 |
| Dif106_CD2193 | 296 |
| Dif146_CD2786 | 297 |
| Dif146_CD2786 | 298 |
| Dif153_CD2830 | 299 |
| Dif153_CD2830 | 300 |
| Dif196_CD1751 | 301 |
| Dif196_CD1751 | 302 |
| Dif207_CD2796 | 303 |
| Dif207_CD2796 | 304 |
| Dif251_CD1858 | 305 |
| Dif251_CD1858 | 306 |
| Dif327_CDR20291_2682 | 307 |
| Dif327_CDR20291_2682 | 308 |
| SleC_CD0551 | 309 |
| SleC_CD0551 | 310 |
| Dif12_CD0183 | 311 |
| Dif12_CD0183 | 312 |
| Dif52_CD1029 | 313 |
| Dif52_CD1029 | 314 |
| Dif53_CD1047 | 315 |
| Dif53_CD1047 | 316 |
| Dif106_CD2193 | 317 |
| Dif106_CD2193 | 318 |
| Dif146_CD2786 | 319 |
| Dif146_CD2786 | 320 |
| Dif153_CD2830 | 321 |
| Dif153_CD2830 | 322 |
| Dif196_CD1751 | 323 |
| Dif196_CD1751 | 324 |
| Dif207_CD2796 | 325 |
| Dif207_CD2796 | 326 |
| Dif251_CD1858 | 327 |
| Dif251_CD1858 | 328 |
| Dif327A_CDR20291_2682 | 329 |
| Dif327A_CDR20291_2682 | 330 |
| Dif12A_f25-170_CD0183 | 331 |
| Dif12_CD0183, primer | 332 |
| Front, Length 22 | |
| Dif12_CD0183, primer | 333 |
| Reverse complement, | |
| Length 26 | |
| Dif52_CD1029, Primer | 334 |
| Front, Length 25 | |
| Dif52_CD1029, Primer | 335 |
| Reverse complement, | |
| Length 29 | |
| Dif53_CD1047, Primer | 336 |
| Front, Length 25 | |
| Dif53_CD1047, Primer | 337 |
| Front, Length 25 | |
| Dif75A_f30-715_CD1469, | 338 |
| primer Front, Length 25 | |
| Dif75A_f30-715_CD1469, | 339 |
| primer Reverse | |
| complement, Length 25 | |
| Dif75B_f715- | 340 |
| 1007_CD1469, primer | |
| Front, Tm ~57°, Length | |
| 19 | |
| Dif75B_f715- | 341 |
| 1007_CD1469, primer | |
| Reverse complement, | |
| Length 26 | |
| Dif106_CD2193, primer | 342 |
| Front, Length 25 | |
| Dif106_CD2193, primer Reverse | 343 |
| complement, Length 20 | |
| Dif146_CD2786, primer Front, | 344 |
| Length 22 | |
| Dif146_CD2786, primer Reverse | 345 |
| complement, Length 24 | |
| Dif153_CD2830, primer Front, | 346 |
| Length 28 | |
| Dif153_CD2830, primer Reverse | 347 |
| complement, Length 23 | |
| Dif196_CD1751, primer Front, | 348 |
| Length 24 | |
| Dif196_CD1751_Reverse | 349 |
| complement, Length 25 | |
| Dif207_CD2796, primer Front, | 350 |
| Length 20 | |
| GSGGGG | 351 |
| GSGSGGGG | 352 |
| ASGGGS | 353 |
| ICICICICICICICICICICICICIC | 354 |
| KLKLLLLLKLK | 355 |
| Dif51 without N-terminal Cyst | 356 |
| Dif51 without N-terminal Cyst | 357 |
| Dif130 without N-terminal Cyst | 358 |
| Dif130 without N-terminal Cyst | 359 |
| Dif183 without N-terminal Cyst | 360 |
| Dif183 without N-terminal Cyst | 361 |
| Dif14 (Forward Primer) | 362 |
| Dif14 (Reverse Primer) | 363 |
| Dif15 (Forward Primer) | 364 |
| Dif15(Reverse Primer) | 365 |
| Dif16 (Forward Primer) | 366 |
| Dif16 (Reverse Primer) | 367 |
| Dif40 (Forward Primer) | 368 |
| Dif40 (reverse Primer) | 369 |
| Dif44 (Forward Primer) | 370 |
| Dif44 (Reverse Primer) | 371 |
| Dif51 (Forward Primer) | 372 |
| Dif51 (Reverse Primer) | 373 |
| Dif55 (Forward Primer) | 374 |
| Dif55 (Reverse Primer) | 375 |
| Dif104 (Forward Primer) | 376 |
| Dif104 (Reverse Primer) | 377 |
| Dif114 (Forward Primer) | 378 |
| Dif114 (Reverse Primer) | 379 |
| Dif130 (Forward Primer) | 380 |
| Dif130 (Reverse Primer) | 381 |
| Dif144 (Forward Primer) | 382 |
| Dif144 (Reverse Primer) | 383 |
| Dif192 (Forward Primer) | 384 |
| Dif192 (Reverse Primer) | 385 |
| Dif194 (Forward Primer) | 386 |
| Dif194 (Reverse Primer) | 387 |
| Dif201 (Forward Primer) | 388 |
| Dif201 (Reverse Primer) | 389 |
| Dif210 (Forward Primer) | 390 |
| Dif210 (Reverse Primer) | 391 |
| Dif211 (Forward Primer) | 392 |
| Dif211 (Reverse Primer) | 393 |
| Dif212 (Forward Primer) | 394 |
| Dif212 (Reverse Primer) | 395 |
| Dif225 (Forward Primer) | 396 |
| Dif225 (Reverse Primer) | 397 |
| Dif231 (Forward Primer) | 398 |
| Dif231 (Reverse Primer) | 399 |
| Dif232 (Forward Primer) | 400 |
| Dif232 (Reverse Primer) | 401 |
| Dif189A f28-498 | 402 |
| (Forward Primer) | |
| Dif189A f28-498 | 403 |
| (Reverse Primer) | |
| Dif189B f521-1622 | 404 |
| (Forward Primer) | |
| Dif189B f521-1622 | 405 |
| (Reverse Primer) | |
| Dif109A f1-539 (Forward | 406 |
| Primer) | |
| Dif109A f1-539 (Reverse | 407 |
| Primer) | |
| Dif109B f541-1132 | 408 |
| (Forward Primer) | |
| Dif109B f541-1132 | 409 |
| (Reverse Primer) | |
| Dif171A f22-568 | 410 |
| (Forward Primer) | |
| Dif171A f22-568 | 411 |
| (Reverse Primer) | |
| Dif171B f561-976 | 412 |
| (Forward Primer) | |
| Dif171B f561-976 | 413 |
| (Reverse Primer) | |
| Dif208A f32-480 | 414 |
| (Forward Primer) | |
| Dif208A f32-480 (Reverse | 415 |
| Primer) | |
| Dif208B f481-938 (Forward | 416 |
| Primer) | |
| Dif208B f481-938 (Reverse | 417 |
| Primer) | |
| Dif14A (Forward Primer) | 418 |
| Dif14A (Reverse Primer) | 419 |
| Dif14B(Forward Primer) | 420 |
| Dif14B(Reverse Primer) | 421 |
| DIF208 (Forward Primer) | 422 |
| DIF208 (Reverse Primer) | 423 |
| DIF183 (Forward Primer) | 424 |
| DIF183 (Reverse Primer) | 425 |
| DIF106A | 426 |
| DIF106A | 427 |
| DIF106C | 428 |
| DIF106C | 429 |
| DIF14A cloned | 430 |
| DIF14A cloned | 431 |
| DIF208 (cloned)DNA | 432 |
| DIF208 (cloned) aa | 433 |
| Dif153 WT in pet15TEV | 434 |
| DIF153 WT (unmodified) | 435 |
| Dif153 E143A pet15TEV | 436 |
| DIF153 E143A | 437 |
| Dif153 H150A pet15TEV | 438 |
| DIF153 H150A | 439 |
| Dif153 Y178F pet15TEV | 440 |
| DIF153 Y178F | 441 |
| Dif153 C208S pet15TEV | 442 |
| DIF153 Cys208S | 443 |
| Dif153 H142A in | 444 |
| pet15TEV | |
| DIF153 H142A | 445 |
| Dif153 H146A in | 446 |
| pet15TEV | |
| DIF153 H146A | 447 |
| Dif153 H142A, H146A in | 448 |
| pet15TEV | |
| DIF153 H142A/H146A | 449 |
| Dif153 H142A/E143A | 450 |
| pet15TEV | |
| DIF153 H142A/E143A | 451 |
| Dif153 H142A/E143R | 452 |
| pet15TEV | |
| DIF153 H142A/E143R | 453 |
| Dif153 H142A/Y178F | 454 |
| pet15TEV | |
| DIF153 H142A/Y178F | 455 |
| Dif153 E143A/Y178F | 456 |
| pet15TEV | |
| DIF153 E143A/Y178F | 457 |
| Dif153 H142A/H150A | 458 |
| pet15TEV | |
| DIF153 H142A/H150A | 459 |
| Dif153 E143A/D149A | 460 |
| pet15TEV | |
| DIF153 E143A/D149A | 461 |
| Dif153 D149A pet15TEV | 462 |
| DIF153 D149A | 463 |
| Dif153 E143R | 464 |
| DIF153 E143R | 465 |
| DIF153 H142A (Forward | 466 |
| Primer) | |
| DIF153 H142A(Reverse | 467 |
| Primer) | |
| Dif153 H146A (Forward | 468 |
| Primer) | |
| DIF153 H146A (Reverse | 469 |
| Primer) | |
| DIF153 H142A, H146A | 470 |
| (Forward Primer) | |
| DIF153 H142A, H146A | 471 |
| (Reverse Primer) | |
| Dif153 E143A(Forward | 472 |
| Primer) | |
| Dif153 E143A (Reverse | 473 |
| Primer) | |

### REFERENCES

[0271] [1] Sebaihia et al. (2006) Nat. Genetics 38:779-786.
[0272] [2] Rupnik et al. (2009) Nat. Rev. Microbiol. 7:526-536.
[0273] [3] Barbut et al. (2000) J Clin. Microbiol. 38:2386-2388.
[0274] [4] Dzink and Bartlett (1980) Antimicrobial Agents and Chemotherapy 17:695-698.
[0275] [5] Musher et al. (2006) The Journal of Antimicrobial Chemotherapy 59:705-710.
[0276] [6] Dudley et al. (1986) Arch. Intern. Med. 146:1101-1104.
[0277] [7] Kink and Williams (1998) Infection and Immunity 66:2018-2025.
[0278] [8] Aboudola et al. (2003) Infection and Immunity 71:1608-1610.
[0279] [9] Geysen et al. (1984) PNAS USA 81:3998-4002.
[0280] [10] Carter (1994) Methods Mol Biol 36:207-23.
[0281] [11] Jameson, B A et al. 1988, CABIOS 4(1):181-186.
[0282] [12] Raddrizzani & Hammer (2000) Brief Bioinform 1(2):179-89.
[0283] [13] Bublil et al. (2007) Proteins 68(1):294-304.
[0284] [14] De Lalla et al. (1999) J Immunol. 163:1725-29.
[0285] [15] Kwok et al. (2001) Trends Immunol 22:583-88.
[0286] [16] Brusic et al. (1998) Bioinformatics 14(2):121-30
[0287] [17] Meister et al. (1995) Vaccine 13(6):581-91.
[0288] [18] Roberts et al. (1996) AIDS Res Hum Retroviruses 12(7):593-610.
[0289] [19] Maksyutov & Zagrebelnaya (1993) Comput Appl Biosci 9(3):291-7.
[0290] [20] Feller & de la Cruz (1991) Nature 349(6311):720-1.
[0291] [21] Hopp (1993) polypeptide Research 6:183-190.
[0292] [22] Welling et al. (1985) FEBS Lett. 188:215-218.
[0293] [23] Davenport et al. (1995) Immunogenetics 42:392-297.
[0294] [24] Tsurui & Takahashi (2007) J Pharmacol Sci. 105(4):299-316.
[0295] [25] Tong et al. (2007) Brief Bioinform. 8(2):96-108.
[0296] [26] Schirle et al. (2001) J Immunol Methods. 257(1-2):1-16.
[0297] [27] Chen et al. (2007) Amino Acids 33(3):423-8.
[0298] [28] Donnelly et al. (1997) Annu Rev Immunol 15:617-648.
[0299] [29] Strugnell et al. (1997) Immunol Cell Biol 75(4):364-369.
[0300] [30] Cui (2005) Adv Genet 54:257-89.
[0301] [31] Robinson & Torres (1997) Seminars in Immunol 9:271-283.
[0302] [32] Brunham et al. (2000) J Infect Dis 181 Suppl 3:S538-43.
[0303] [33] Svanholm et al. (2000) Scand J Immunol 51(4):345-53.
[0304] [34] DNA Vaccination—Genetic Vaccination (1998) eds. Koprowski et al. (ISBN 3540633928).
[0305] [35] Gene Vaccination: Theory and Practice (1998) ed. Raz (ISBN 3540644288).
[0306] [36] U.S. Pat. No. 5,707,829
[0307] [37] Current Protocols in Molecular Biology (F. M. Ausubel et al. eds., 1987) Supplement 30.
[0308] [38] Findeis et al., Trends Biotechnol. (1993) 11:202
[0309] [39] Chiou et al. (1994) Gene Therapeutics: Methods And Applications Of Direct Gene Transfer. ed. Wolff
[0310] [40] Wu et al., J Biol. Chem. (1988) 263:621
[0311] [41] Wu et al., J. Biol. Chem. (1994) 269:542
[0312] [42] Zenke et al., Proc. Natl. Acad. Sci. (USA) (1990) 87:3655
[0313] [43] Wu et al., J. Biol. Chem. (1991) 266:338
[0314] [44] Jolly, Cancer Gene Therapy (1994) 1:51
[0315] [45] Kimura, Human Gene Therapy (1994) 5:845
[0316] [46] Connelly, Human Gene Therapy (1995) 1:185
[0317] [47] Kaplitt, Nature Genetics (1994) 6:148
[0318] [48] WO 90/07936.
[0319] [49] WO 94/03622.
[0320] [50] WO 93/25698.
[0321] [51] WO 93/25234.
[0322] [52] U.S. Pat. No. 5,219,740.
[0323] [53] WO 93/11230.
[0324] [54] WO 93/10218.
[0325] [55] U.S. Pat. No. 4,777,127.
[0326] [56] GB Patent No. 2,200,651.
[0327] [57] EP-A-0345242.
[0328] [58] WO 91/02805.
[0329] [59] WO 94/12649.
[0330] [60] WO 93/03769.
[0331] [61] WO 93/19191.
[0332] [62] WO 94/28938.
[0333] [63] WO 95/11984.
[0334] [64] WO 95/00655.
[0335] [65] Curiel, Hum. Gene Ther. (1992) 3:147
[0336] [66] Wu, J Biol. Chem. (1989) 264:16985
[0337] [67] U.S. Pat. No. 5,814,482.
[0338] [68] WO 95/07994.
[0339] [69] WO 96/17072.
[0340] [70] WO 95/30763.
[0341] [71] WO 97/42338.
[0342] [72] WO 90/11092.
[0343] [73] U.S. Pat. No. 5,580,859
[0344] [74] U.S. Pat. No. 5,422,120
[0345] [75] WO 95/13796.
[0346] [76] WO 94/23697.
[0347] [77] WO 91/14445.
[0348] [78] EP-0524968.
[0349] [79] Philip, Mol. Cell Biol. (1994) 14:2411
[0350] [80] Woffendin, Proc. Natl. Acad. Sci. (1994) 91:11581
[0351] [81] U.S. Pat. No. 5,206,152.
[0352] [82] WO 92/11033.
[0353] [83] U.S. Pat. No. 5,149,655.
[0354] [84] Winter et al., (1991) Nature 349:293-99
[0355] [85] U.S. Pat. No. 4,816,567.
[0356] [86] Inbar et al., (1972) Proc. Natl. Acad. Sci. U.S.A. 69:2659-62.
[0357] [87] Ehrlich et al., (1980) Biochem 19:4091-96.
[0358] [88] Huston et al., (1988) Proc. Natl. Acad. Sci. U.S.A. 85:5897-83.
[0359] [89] Pack et al., (1992) Biochem 31, 1579-84.
[0360] [90] Cumber et al., (1992) J Immunology 149B, 120-26.
[0361] [91] Riechmann et al., (1988) Nature 332, 323-27.
[0362] [92] Verhoeyan et al., (1988) Science 239, 1534-36.
[0363] [93] GB 2,276,169.
[0364] [94] Gennaro (2000) Remington: The Science and Practice of Pharmacy. 20th edition, ISBN: 0683306472.
[0365] [95] Vaccine Design (1995) eds. Powell & Newman. ISBN: 030644867X. Plenum.
[0366] [96] WO90/14837.
[0367] [97] WO90/14837.
[0368] [98] Podda & Del Giudice (2003) Expert Rev Vaccines 2:197-203.
[0369] [99] Podda (2001) Vaccine 19: 2673-2680.
[0370] [100] Vaccine Design: The Subunit and Adjuvant Approach (eds. Powell & Newman) Plenum Press 1995 (ISBN 0-306-44867-X).
[0371] [101] Vaccine Adjuvants: Preparation Methods and Research Protocols (Volume 42 of Methods in Molecular Medicine series). ISBN: 1-59259-083-7. Ed. O'Hagan.
[0372] [102] U.S. Pat. No. 5,057,540.
[0373] [103] Niikura et al. (2002) Virology 293:273-280.
[0374] [104] Lenz et al. (2001) J Immunol 166:5346-5355.
[0375] [105] Pinto et al. (2003)J Infect Dis 188:327-338.
[0376] [106] Gerber et al. (2001) J Virol 75:4752-4760.
[0377] [107] WO03/024480.
[0378] [108] WO03/024481.
[0379] [109] Gluck et al. (2002) Vaccine 20:B10-B16.
[0380] [110] Meraldi et al. (2003) Vaccine 21:2485-2491.
[0381] [111] Pajak et al. (2003) Vaccine 21:836-842.
[0382] [112] Krieg (2003) Nature Medicine 9:831-835.
[0383] [113] McCluskie et al. (2002) FEMS Immunology and Medical Microbiology 32:179-185.
[0384] [114] WO98/40100.
[0385] [115] U.S. Pat. No. 6,207,646.
[0386] [116] U.S. Pat. No. 6,239,116.
[0387] [117] U.S. Pat. No. 6,429,199.
[0388] [118] Schellack et al. (2006) Vaccine 24:5461-72.
[0389] [119] Johnson et al. (1999) Bioorg Med Chem Lett 9:2273-2278.
[0390] [120] Evans et al. (2003) Expert Rev Vaccines 2:219-229.
[0391] [121] Beignon et al. (2002) Infect Immun 70:3012-3019.
[0392] [122] Pizza et al. (2001) Vaccine 19:2534-2541.
[0393] [123] Pizza et al. (2000) Int J Med Microbiol 290:455-461.
[0394] [124] Scharton-Kersten et al. (2000) Infect Immun 68:5306-5313.
[0395] [125] Ryan et al. (1999) Infect Immun 67:6270-6280.
[0396] [126] Partidos et al. (1999) Immunol Lett 67:209-216.
[0397] [127] Peppoloni et al. (2003) Expert Rev Vaccines 2:285-293.
[0398] [128] Pine et al. (2002) J Control Release 85:263-270.
[0399] [129] WO99/40936.
[0400] [130] WO99/44636.
[0401] [131] Singh et al] (2001) J Cont Release 70:267-276.
[0402] [132] WO99/27960.
[0403] [133] U.S. Pat. No. 6,090,406.
[0404] [134] U.S. Pat. No. 5,916,588.
[0405] [135] EP-A-0626169.
[0406] [136] WO99/52549.
[0407] [137] Andrianov et al. (1998) Biomaterials 19:109-115.
[0408] [138] Payne et al. (1998) Adv Drug Delivery Review 31:185-196.
[0409] [139] Stanley (2002) Clin Exp Dermatol 27:571-577.
[0410] [140] Jones (2003) Curr Opin Investig Drugs 4:214-218.
[0411] [141] WO99/11241.
[0412] [142] WO94/00153.
[0413] [143] WO98/57659.
[0414] [144] European patent applications 0835318, 0735898 and 0761231.
[0415] [145] Ogunniyi et al. (2001) Infect Immun 69:5997-6003.
[0416] [146] WO2006/110603.
[0417] [147] WO2009/033268
[0418] [148] Research Disclosure, 453077 (January 2002).
[0419] [149] EP-A-0372501.
[0420] [150] EP-A-0378881.
[0421] [151] EP-A-0427347.
[0422] [152] WO93/17712.
[0423] [153] WO94/03208.
[0424] [154] WO98/58668.
[0425] [155] EP-A-0471177.
[0426] [156] WO91/01146.
[0427] [157] Falugi et al. (2001) Eur J Immunol 31:3816-3824.
[0428] [158] Baraldo et al. (2004) Infect Immun 72(8):4884-7.
[0429] [159] EP-A-0594610.
[0430] [160] Ruan et al. (1990) J Immunol 145:3379-3384.
[0431] [161] WO00/56360.
[0432] [162] Kuo et al. (1995) Infect Immun 63:2706-13.
[0433] [163] Michon et al. (1998) Vaccine. 16:1732-41.
[0434] [164] WO02/091998.
[0435] [165] WO01/72337.
[0436] [166] WO00/61761.
[0437] [167] WO00/33882
[0438] [168] U.S. Pat. No. 4,761,283.
[0439] [169] U.S. Pat. No. 4,882,317.
[0440] [170] U.S. Pat. No. 4,695,624.
[0441] [171] Mol. Immunol., 1985, 22, 907-919
[0442] [172] EP-A-0208375.
[0443] [173] Bethell G. S. et al., J. Biol. Chem., 1979, 254, 2572-4
[0444] [174] Hearn M. T. W., J Chromatogr., 1981, 218, 509-18
[0445] [175] WO00/10599.
[0446] [176] Gever et al., Med. Microbiol. Immunol, 165: 171-288 (1979).
[0447] [177] U.S. Pat. No. 4,057,685.
[0448] [178] U.S. Pat. Nos. 4,673,574; 4,761,283; 4,808,700.
[0449] [179] U.S. Pat. No. 4,459,286.
[0450] [180] U.S. Pat. No. 4,965,338.
[0451] [181] U.S. Pat. No. 4,663,160.
[0452] [182] WO2007/000343.
[0453] [183] WO98/04702
[0454] [184] WO99/24578, WO99/36544, WO99/57280, WO00/22430, Tettelin et al. (2000) Science 287:1809-1815, Pizza et al. (2000) Science 287:1816-1820 and WO96/29412
[0455] [185] WO01/52885; Bjune et al. (1991) Lancet 338(8775):1093-1096; Fukasawa et al. (1999) Vaccine 17:2951-2958; Rosenqvist et al. (1998) Dev. Biol. Stand. 92:323-333
[0456] [186] Costantino et al. (1992) Vaccine 10:691-698
[0457] [187] Costantino et al. (1999) Vaccine 17:1251-1263
[0458] [188] e.g. Watson (2000) Pediatr Infect Dis J 19:331-332; Rubin (2000) Pediatr Clin North Am 47:269-285, v; Jedrzejas (2001) Microbiol Mol Biol Rev 65:187-207
[0459] [189] e.g. Bell (2000) Pediatr Infect Dis J19:1187-1188; Iwarson (1995) APMIS 103:321-326
[0460] [190] Gerlich et al. (1990) Vaccine 8 Suppl:S63-68 & 79-80
[0461] [191] Hsu et al. (1999) Clin Liver Dis 3:901-915
[0462] [192] Gustafsson et al. (1996) N Engl. J. Med. 334:349-355; Rappuoli et al. (1991) TIBTECH 9:232-238
[0463] [193] chapter 3 of Vaccines (1988) eds. Plotkin & Mortimer. ISBN 0-7216-1946-0
[0464] [194] Del Guidice et al. (1998) Molecular Aspects of Medicine 19:1-70
[0465] [195] chapter 4 of Vaccines (1988) eds. Plotkin & Mortimer. ISBN 0-7216-1946-0
[0466] [196] WO99/24578, WO99/36544, WO99/57280
[0467] [197] PCT/IB01/01445; Kalman et al. (1999) Nature Genetics 21:385-389; Read et al. (2000) Nucleic Acids Res 28:1397-406; Shirai et al. (2000) J. Infect. Dis. 181(Suppl 3):5524-5527; WO99/27105; WO00/27994; WO00/37494
[0468] [198] WO99/28475
[0469] [199] Ross et al. (2001) Vaccine 19:4135-4142
[0470] [200] Sutter et al. (2000) Pediatr Clin North Am 47:287-308; Zimmerman & Spann (1999) Am Fam Physician 59:113-118, 125-126
[0471] [201] Dreesen (1997) Vaccine 15 Suppl:S2-6
[0472] [202] MMWR Morb Mortal Wkly Rep 1998 Jan. 16; 47(1):12, 19
[0473] [203] Chapters 9, 10 & 11 of Vaccines (1988) eds Plotkin & Mortimer. ISBN 0-7216-1946-0
[0474] [204] Chapter 19 of Vaccines (1988) eds Plotkin & Mortimer. ISBN 0-7216-1946-0
[0475] [205] McMichael (2000) Vaccine 19 Suppl 1:S101-107
[0476] [206] Kuroda et al. (2001) Lancet 357(9264):1225-1240; see also pages 1218-1219
[0477] [207] Schuchat (1999) Lancet 353(9146):51-6.
[0478] [208] WO02/34771.
[0479] [209] Kuroda et al. (2001) Lancet 357(9264):1225-1240; see also pages 1218-1219
[0480] [210] Rice et al. (2000) Trends Genet 16:276-277.
[0481] [211] Needleman & Wunsch (1970) J Mol. Biol. 48, 443-453.
[0482] [212] [212] Gennaro (2000) Remington: The Science and Practice of Pharmacy. 20th edition, ISBN: 0683306472.
[0483] [213] Methods In Enzymology (S. Colowick and N. Kaplan, eds., Academic Press, Inc.)
[0484] [214] Handbook of Experimental Immunology, Vols. I-IV (D. M. Weir and C. C. Blackwell, eds, 1986, Blackwell Scientific Publications)
[0485] [215] Sambrook et al. (2001) Molecular Cloning: A Laboratory Manual, 3rd edition (Cold Spring Harbor Laboratory Press).
[0486] [216] Handbook of Surface and Colloidal Chemistry (Birdi, K. S. ed., CRC Press, 1997)
[0487] [217] Ausubel et al. (eds) (2002) Short protocols in molecular biology, 5th edition (Current Protocols).
[0488] [218] Molecular Biology Techniques: An Intensive Laboratory Course, (Ream et al., eds., 1998, Academic Press)
[0489] [219] PCR (Introduction to Biotechniques Series), 2nd ed. (Newton & Graham eds., 1997, Springer Verlag)
[0490] [220] Gardy et al. (2005) Bioinformatics 21: 617-23

1-23. (canceled)

24. An immunogenic composition comprising:
a) a C. difficile polypeptide comprising an amino acid sequence (i) having 80% or more identity to any one of SEQ ID NOs:139, 79, 433, and 133; or (ii) comprising a fragment of at least 7 consecutive amino acids of any one of SEQ ID NOs:139, 79, 433, and 133;
b) a nucleic acid molecule encoding the polypeptide of (a), and/or
c) an antibody capable of binding to the polypeptide of (a).

25. The immunogenic composition of claim 24, wherein the C. difficile polypeptide of (a) is Dif44 or Dif208.

26. The immunogenic composition of claim 24, further comprising at least one C. difficile ToxB-GT antigen and at least one C. difficile TcdA antigen, nucleic acid molecules encoding said antigens, and/or antibodies capable of binding to said antigens.

27. The immunogenic composition of claim 26, wherein the ToxB-GT antigen and/or the TcdA antigen are detoxified.

28. The immunogenic composition of claim 24, wherein said fragment comprises an amino acid sequence having 80% or more identity to SEQ ID NO:111, SEQ ID NO:113, SEQ ID NO:171 or SEQ ID NO:173.

29. The immunogenic composition of claim 26, wherein the ToxB-GT antigen is a polypeptide that comprises or consists of an amino acid sequence:
a) having 80% or more identity to SEQ ID NO:18 or SEQ ID NO: 60; and/or
b) that is a fragment of at least 7 consecutive amino acids of SEQ ID NO:18 or SEQ ID NO: 60, or of a polypeptide having 80% or more identity to SEQ ID NO:18 or SEQ ID NO: 60 and that comprises an epitope of SEQ ID NO:18 or SEQ ID NO: 60.

30. The immunogenic composition of claim 26, wherein the TcdA antigen is a polypeptide that comprises or consists of an amino acid sequence:
a) having 80% or more identity to SEQ ID NO:11, 1, 3, 4, 5, 6, 7, 8, 9, 10, 12, 13, 14, 15 or 16; and/or
b) that is a fragment of at least 7 consecutive amino acids of any of SEQ ID NOs:11, 1, 3, 4, 5, 6, 7, 8, 9, 10, 12, 13, 14, 15 or 16, or of a polypeptide having 80% or more identity to any of SEQ ID NOs:11, 1, 3, 4, 5, 6, 7, 8, 9, 10, 12, 13, 14, 15 or 16 and that comprises an epitope of any of SEQ ID NOs:11, 1, 3, 4, 5, 6, 7, 8, 9, 10, 12, 13, 14, 15 or 16.

31. The immunogenic composition of claim 30, further comprising 1, 2, 3, 4, 5, 6, 7, 8, 9, 10, 11, 12, 13, 14, 15 or more additional TcdA antigens, optionally selected from (1) a ToxA-ED antigen (SEQ ID NO: 3), (2) a ToxA-GT antigen (SEQ ID NO: 4), (3) a ToxA-CP antigen (SEQ ID NO:5), (4) a ToxA-T antigen (SEQ ID NO: 6), (5) a ToxA-T4 antigen (SEQ ID NO: 7), (6) a ToxA-B antigen (SEQ ID NO: 8), (7) a ToxA-PTA2 antigen (SEQ ID NO: 9), (8) a ToxA-P5-7 antigen (SEQ ID NO: 10), (9) a ToxA-P5-6 antigen (SEQ ID NO: 11), (10) a ToxA-P9-10 antigen (SEQ ID NO: 12), (11) a ToxA-B2 antigen (SEQ ID NO: 13), (12) a ToxA-B3 antigen (SEQ ID NO: 14), (13) a ToxA-B5 antigen (SEQ ID NO: 15), (14) a ToxA-B6 antigen (SEQ ID NO: 16) or a full-length TcdA antigen (SEQ ID NO:1).

32. An immunogenic composition of claim 26, wherein the TcdA antigen is ToxA-P5-6.

33. The immunogenic composition of claim 24, wherein when more than one antigen is present, at least two of the antigens in the composition are in the form of a hybrid polypeptide.

34. The immunogenic composition of claim 24, wherein none of the antigens are in the form of a hybrid polypeptide.

35. The immunogenic composition of claim 24, wherein said composition induces neutralisation titers against C. difficile toxin A and toxin B when administered to a subject.

36. The immunogenic composition of claim 24, comprising at least one further C. difficile antigen, optionally wherein said further C. difficile antigen is a saccharide antigen.

37. The immunogenic composition of claim 24, wherein the immunogenic composition is a vaccine.

38. The vaccine of claim 37, further comprising an adjuvant.

39. The vaccine of claim 37, wherein the vaccine is a prophylactic vaccine for the prevention of C. difficile associated disease.

40. The vaccine of claim 37, wherein the vaccine is a therapeutic vaccine for the treatment of C. difficile associated disease.

The application's sequence listing, which the Patent Office published only in electronic form, follows.

SEQUENCE LISTING (473 sequences)

SEQ ID NO: 1 - protein, 2710 aa, Clostridium difficile
MSLISKEELIKLAYSIRPRENEYKTILTNLDEYNKLTTNNNENKYLQLKKLNESIDVFMNKYKTSSRNRALSNLKKDILKEVILIKNSNTSPVEKNLHFVWIGGEVSDIALEYIKQWADINAEYNIKLWYDSEAFLVNTLKKAIVESSTTEALQLLEEEIQNPQFDNMKFYKKRMEFIYDRQKRFINYYKSQINKPTVPTIDDIIKSHLVSEYNRDETVLESYRTNSLRKINSNHGIDIRANSLFTEQELLNIYSQELLNRGNLAAASDIVRLLALKNFGGVYLDVDMLPGIHSDLFKTISRPSSIGLDRWEMIKLEAIMKYKKYINNYTSENFDKLDQQLKDNFKLIIESKSEKSEIFSKLENLNVSDLEIKIAFALGSVINQALISKQGSYLTNLVIEQVKNRYQFLNQHLNPAIESDNNFTDTTKIFHDSLFNSATAENSMFLTKIAPYLQVGFMPEARSTISLSGPGAYASAYYDFINLQENTIEKTLKASDLIEFKFPENNLSQLTEQEINSLWSFDQASAKYQFEKYVRDYTGGSLSEDNGVDFNKNTALDKNYLLNNKIPSNNVEEAGSKNYVHYIIQLQGDDISYEATCNLFSKNPKNSIIIQRNMNESAKSYFLSDDGESILELNKYRIPERLKNKEKVKVTFIGHGKDEFNTSEFARLSVDSLSNEISSFLDTIKLDISPKNVEVNLLGCNMFSYDFNVEETYPGKLLLSIMDKITSTLPDVNKNSITIGANQYEVRINSEGRKELLAHSGKWINKEEAIMSDLSSKEYIFFDSIDNKLKAKSKNIPGLASISEDIKTLLLDASVSPDTKFILNNLKLNIESSIGDYIYYEKLEPVKNIIHNSIDDLIDEFNLLENVSDELYELKKLNNLDEKYLISFEDISKNNSTYSVRFINKSNGESVYVETEKEIFSKYSEHITKEISTIKNSIITDVNGNLLDNIQLDHTSQVNTLNAAFFIQSLIDYSSNKDVLNDLSTSVKVQLYAQLFSTGLNTIYDSIQLVNLISNAVNDTINVLPTITEGIPIVSTILDGINLGAAIKELLDEHDPLLKKELEAKVGVLAINMSLSIAATVASIVGIGAEVTIFLLPIAGISAGIPSLVNNELILHDKATSVVNYFNHLSESKKYGPLKTEDDKILVPIDDLVISEIDFNNNSIKLGTCNILAMEGGSGHTVTGNIDHFFSSPSISSHIPSLSIYSAIGIETENLDFSKKIMMLPNAPSRVFWWETGAVPGLRSLENDGTRLLDSIRDLYPGKFYWRFYAFFDYAITTLKPVYEDTNIKIKLDKDTRNFIMPTITTNEIRNKLSYSFDGAGGTYSLLLSSYPISTNINLSKDDLWIFNIDNEVREISIENGTIKKGKLIKDVLSKIDINKNKLIIGNQTIDFSGDIDNKDRYIFLTCELDDKISLIIEINLVAKSYSLLLSGDKNYLISNLSNIIEKINTLGLDSKNIAYNYTDESNNKYFGAISKTSQKSIIHYKKDSKNILEFYNDSTLEFNSKDFIAEDINVFMKDDINTITGKYYVDNNTDKSIDFSISLVSKNQVKVNGLYLNESVYSSYLDFVKNSDGHHNTSNFMNLFLDNISFWKLFGFENINFVIDKYFTLVGKTNLGYVEFICDNNKNIDIYFGEWKTSSSKSTIFSGNGRNVVVEPIYNPDTGEDISTSLDFSYEPLYGIDRYINKVLIAPDLYTSLININTNYYSNEYYPEIIVLNPNTFHKKVNINLDSSSFEYKWSTEGSDFILVRYLEESNKKILQKIRIKGILSNTQSFNKMSIDFKDIKKLSLGYIMSNFKSFNSENELDRDHLGFKIIDNKTYYYDEDSKLVKGLININNSLFYFDPIEFNLVTGWQTINGKKYYFDINTGAALISYKIINGKHFYFNNDGVMQLGVFKGPDGFEYFAPANTQNNNIEGQAIVYQSKFLTLNGKKYYFDNDSKAVTGWRIINNEKYYFNPNNAIAAVGLQVIDNNKYYFNPDTAIISKGWQTVNGSRYYFDTDTAIAFNGYKTIDGKHFYFDSDCVVKIGVFSTSNGFEYFAPANTYNNNIEGQAIVYQSKFLTLNGKKYYFDNNSKAVTGWQTIDSKKYYFNTNTAEAATGWQTIDGKKYYFNTNTAEAATGWQTIDGKKYYFNTNTAIASTGYTIINGKHFYFNTDGIMQIGVFKGPNGFEYFAPANTDANNIEGQAILYQNEFLTLNGKKYYFGSDSKAVTGWRIINNKKYYFNPNNAIAAIHLCTINNDKYYFSYDGILQNGYITIERNNFYFDANNESKMVTGVFKGPNGFEYFAPANTHNNNIEGQAIVYQNKFLTLNGKKYYFDNDSKAVTGWQTIDGKKYYFNLNTAEAATGWQTIDGKKYYFNLNTAEAATGWQTIDGKKYYFNTNTFIASTGYTSINGKHFYFNTDGIMQIGVFKGPNGFEYFAPANTHNNNIEGQAILYQNKFLTLNGKKYYFGSDSKAVTGLRTIDGKKYYFNTNTAVAVTGWQTINGKKYYFNTNTSIASTGYTIISGKHFYFNTDGIMQIGVFKGPDGFEYFAPANTDANNIEGQAIRYQNRFLYLHDNIYYFGNNSKAATGWVTIDGNRYYFEPNTAMGANGYKTIDNKNFYFRNGLPQIGVFKGSNGFEYFAPANTDANNIEGQAIRYQNRFLHLLGKIYYFGNNSKAVTGWQTINGKVYYFMPDTAMAAAGGLFEIDGVIYFFGVDGVKAPGIYG

SEQ ID NO: 2 - protein, 2366 aa, Clostridium difficile
MSLVNRKQLEKMANVRFRTQEDEYVAILDALEEYHNMSENTVVEKYLKLKDINSLTDIYIDTYKKSGRNKALKKFKEYLVTEVLELKNNNLTPVEKNLHFVWIGGQINDTAINYINQWKDVNSDYNVNVFYDSNAFLINTLKKTVVESAINDTLESFRENLNDPRFDYNKFFRKRMEIIYDKQKNFINYYKAQREENPELIIDDIVKTYLSNEYSKEIDELNTYIEESLNKITQNSGNDVRNFEEFKNGESFNLYEQELVERWNLAAASDILRISALKEIGGMYLDVDMLPGIQPDLFESIEKPSSVTVDFWEMTKLEAIMKYKEYIPEYTSEHFDMLDEEVQSSFESVLASKSDKSEIFSSLGDMEASPLEVKIAFNSKGIINQGLISVKDSYCSNLIVKQIENRYKILNNSLNPAISEDNDFNTTTNTFIDSIMAEANADNGRFMMELGKYLRVGFFPDVKTTINLSGPEAYAAAYQDLLMFKEGSMNIHLIEADLRNFEISKTNISQSTEQEMASLWSFDDARAKAQFEEYKRNYFEGSLGEDDNLDFSQNIVVDKEYLLEKISSLARSSERGYIHYIVQLQGDKISYEAACNLFAKTPYDSVLFQKNIEDSEIAYYYNPGDGEIQEIDKYKIPSIISDRPKIKLTFIGHGKDEFNTDIFAGFDVDSLSTEIEAAIDLAKEDISPKSIEINLLGCNMFSYSINVEETYPGKLLLKVKDKISELMPSISQDSIIVSANQYEVRINSEGRRELLDHSGEWINKEESIIKDISSKEYISFNPKENKITVKSKNLPELSTLLQEIRNNSNSSDIELEEKVMLTECEINVISNIDTQIVEERIEEAKNLTSDSINYIKDEFKLIESISDALCDLKQQNELEDSHFISFEDISETDEGFSIRFINKETGESIFVETEKTIFSEYANHITEEISKIKGTIFDTVNGKLVKKVNLDTTHEVNTLNAAFFIQSLIEYNSSKESLSNLSVAMKVQVYAQLFSTGLNTITDAAKVVELVSTALDETIDLLPTLSEGLPIIATIIDGVSLGAAIKELSETSDPLLRQEIEAKIGIMAVNLTTATTAIITSSLGIASGFSILLVPLAGISAGIPSLVNNELVLRDKATKVVDYFKHVSLVETEGVFTLLDDKIMMPQDDLVISEIDFNNNSIVLGKCEIWRMEGGSGHTVTDDIDHFFSAPSITYREPHLSIYDVLEVQKEELDLSKDLMVLPNAPNRVFAWETGWTPGLRSLENDGTKLLDRIRDNYEGEFYWRYFAFIADALITTLKPRYEDTNIRINLDSNTRSFIVPIITTEYIREKLSYSFYGSGGTYALSLSQYNMGINIELSESDVWIIDVDNVVRDVTIESDKIKKGDLIEGILSTLSIEENKIILNSHEINFSGEVNGSNGFVSLTFSILEGINAIIEVDLLSKSYKLLISGELKILMLNSNHIQQKIDYIGFNSELQKNIPYSFVDSEGKENGFINGSTKEGLFVSELPDVVLISKVYMDDSKPSFGYYSNNLKDVKVITKDNVNILTGYYLKDDIKISLSLTLQDEKTIKLNSVHLDESGVAEILKFMNRKGNTNTSDSLMSFLESMNIKSIFVNFLQSNIKFILDANFIISGTTSIGQFEFICDENDNIQPYFIKFNTLETNYTLYVGNRQNMIVEPNYDLDDSGDISSTVINFSQKYLYGIDSCVNKVVISPNIYTDEINITPVYETNNTYPEVIVLDANYINEKINVNINDLSIRYVWSNDGNDFILMSTSEENKVSQVKIRFVNVFKDKTLANKLSFNFSDKQDVPVSEIILSFTPSYYEDGLIGYDLGLVSLYNEKFYINNFGMMVSGLIYINDSLYYFKPPVNNLITGFVTVGDDKYYFNPINGGAASIGETIIDDKNYYFNQSGVLQTGVFSTEDGFKYFAPANTLDENLEGEAIDFTGKLIIDENIYYFDDNYRGAVEWKELDGEMHYFSPETGKAFKGLNQIGDYKYYFNSDGVMQKGFVSINDNKHYFDDSGVMKVGYTEIDGKHFYFAENGEMQIGVFNTEDGFKYFAHHNEDLGNEEGEEISYSGILNFNNKIYYFDDSFTAVVGWKDLEDGSKYYFDEDTAEAYIGLSLINDGQYYFNDDGIMQVGFVTINDKVFYFSDSGIIESGVQNIDDNYFYIDDNGIVQIGVFDTSDGYKYFAPANTVNDNIYGQAVEYSGLVRVGEDVYYFGETYTIETGWIYDMENESDKYYFNPETKKACKGINLIDDIKYYFDEKGIMRTGLISFENNNYYFNENGEMQFGYINIEDKMFYFGEDGVMQIGVFNTPDGFKYFAHQNTLDENFEGESINYTGWLDLDEKRYYFTDEYIAATGSVIIDGEEYYFDPDTAQLVISE

SEQ ID NO: 3 - protein, 769 aa, Clostridium difficile
MSLISKEELIKLAYSIRPRENEYKTILTNLDEYNKLTTNNNENKYLQLKKLNESIDVFMNKYKTSSRNRALSNLKKDILKEVILIKNSNTSPVEKNLHFVWIGGEVSDIALEYIKQWADINAEYNIKLWYDSEAFLVNTLKKAIVESSTTEALQLLEEEIQNPQFDNMKFYKKRMEFIYDRQKRFINYYKSQINKPTVPTIDDIIKSHLVSEYNRDETVLESYRTNSLRKINSNHGIDIRANSLFTEQELLNIYSQELLNRGNLAAASDIVRLLALKNFGGVYLDVDMLPGIHSDLFKTISRPSSIGLDRWEMIKLEAIMKYKKYINNYTSENFDKLDQQLKDNFKLIIESKSEKSEIFSKLENLNVSDLEIKIAFALGSVINQALISKQGSYLTNLVIEQVKNRYQFLNQHLNPAIESDNNFTDTTKIFHDSLFNSATAENSMFLTKIAPYLQVGFMPEARSTISLSGPGAYASAYYDFINLQENTIEKTLKASDLIEFKFPENNLSQLTEQEINSLWSFDQASAKYQFEKYVRDYTGGSLSEDNGVDFNKNTALDKNYLLNNKIPSNNVEEAGSKNYVHYIIQLQGDDISYEATCNLFSKNPKNSIIIQRNMNESAKSYFLSDDGESILELNKYRIPERLKNKEKVKVTFIGHGKDEFNTSEFARLSVDSLSNEISSFLDTIKLDISPKNVEVNLLGCNMFSYDFNVEETYPGKLLLSIMDKITSTLPDVNKNSITIGANQYEVRINSEGRKELLAHSGKWINKEEA

SEQ ID NO: 4 - protein, 541 aa, Clostridium difficile
MSLISKEELIKLAYSIRPRENEYKTILTNLDEYNKLTTNNNENKYLQLKKLNESIDVFMNKYKTSSRNRALSNLKKDILKEVILIKNSNTSPVEKNLHFVWIGGEVSDIALEYIKQWADINAEYNIKLWYDSEAFLVNTLKKAIVESSTTEALQLLEEEIQNPQFDNMKFYKKRMEFIYDRQKRFINYYKSQINKPTVPTIDDIIKSHLVSEYNRDETVLESYRTNSLRKINSNHGIDIRANSLFTEQELLNIYSQELLNRGNLAAASDIVRLLALKNFGGVYLDVDMLPGIHSDLFKTISRPSSIGLDRWEMIKLEAIMKYKKYINNYTSENFDKLDQQLKDNFKLIIESKSEKSEIFSKLENLNVSDLEIKIAFALGSVINQALISKQGSYLTNLVIEQVKNRYQFLNQHLNPAIESDNNFTDTTKIFHDSLFNSATAENSMFLTKIAPYLQVGFMPEARSTISLSGPGAYASAYYDFINLQENTIEKTLKASDLIEFKFPENNLSQLTEQEINSLWSFDQASAKYQFEKYVRDYTGGS

SEQ ID NO: 5 - protein, 228 aa, Clostridium difficile
LSEDNGVDFNKNTALDKNYLLNNKIPSNNVEEAGSKNYVHYIIQLQGDDISYEATCNLFSKNPKNSIIIQRNMNESAKSYFLSDDGESILELNKYRIPERLKNKEKVKVTFIGHGKDEFNTSEFARLSVDSLSNEISSFLDTIKLDISPKNVEVNLLGCNMFSYDFNVEETYPGKLLLSIMDKITSTLPDVNKNSITIGANQYEVRINSEGRKELLAHSGKWINKEEA

SEQ ID NO: 6 - protein, 1039 aa, Clostridium difficile
IMSDLSSKEYIFFDSIDNKLKAKSKNIPGLASISEDIKTLLLDASVSPDTKFILNNLKLNIESSIGDYIYYEKLEPVKNIIHNSIDDLIDEFNLLENVSDELYELKKLNNLDEKYLISFEDISKNNSTYSVRFINKSNGESVYVETEKEIFSKYSEHITKEISTIKNSIITDVNGNLLDNIQLDHTSQVNTLNAAFFIQSLIDYSSNKDVLNDLSTSVKVQLYAQLFSTGLNTIYDSIQLVNLISNAVNDTINVLPTITEGIPIVSTILDGINLGAAIKELLDEHDPLLKKELEAKVGVLAINMSLSIAATVASIVGIGAEVTIFLLPIAGISAGIPSLVNNELILHDKATSVVNYFNHLSESKKYGPLKTEDDKILVPIDDLVISEIDFNNNSIKLGTCNILAMEGGSGHTVTGNIDHFFSSPSISSHIPSLSIYSAIGIETENLDFSKKIMMLPNAPSRVFWWETGAVPGLRSLENDGTRLLDSIRDLYPGKFYWRFYAFFDYAITTLKPVYEDTNIKIKLDKDTRNFIMPTITTNEIRNKLSYSFDGAGGTYSLLLSSYPISTNINLSKDDLWIFNIDNEVREISIENGTIKKGKLIKDVLSKIDINKNKLIIGNQTIDFSGDIDNKDRYIFLTCELDDKISLIIEINLVAKSYSLLLSGDKNYLISNLSNIIEKINTLGLDSKNIAYNYTDESNNKYFGAISKTSQKSIIHYKKDSKNILEFYNDSTLEFNSKDFIAEDINVFMKDDINTITGKYYVDNNTDKSIDFSISLVSKNQVKVNGLYLNESVYSSYLDFVKNSDGHHNTSNFMNLFLDNISFWKLFGFENINFVIDKYFTLVGKTNLGYVEFICDNNKNIDIYFGEWKTSSSKSTIFSGNGRNVVVEPIYNPDTGEDISTSLDFSYEPLYGIDRYINKVLIAPDLYTSLININTNYYSNEYYPEIIVLNPNTFHKKVNINLDSSSFEYKWSTEGSDFILVRYLEESNKKILQKIRIKGILSNTQSFNKMSIDFKDIKKLSLGYIMSNFKSFNSENELDR

SEQ ID NO: 7 - protein, 266 aa, Clostridium difficile
AEDINVFMKDDINTITGKYYVDNNTDKSIDFSISLVSKNQVKVNGLYLNESVYSSYLDFVKNSDGHHNTSNFMNLFLDNISFWKLFGFENINFVIDKYFTLVGKTNLGYVEFICDNNKNIDIYFGEWKTSSSKSTIFSGNGRNVVVEPIYNPDTGEDISTSLDFSYEPLYGIDRYINKVLIAPDLYTSLININTNYYSNEYYPEIIVLNPNTFHKKVNINLDSSSFEYKWSTEGSDFILVRYLEESNKKILQKIRIKGILSNTQSF

SEQ ID NO: 8 - protein, 902 aa, Clostridium difficile
DHLGFKIIDNKTYYYDEDSKLVKGLININNSLFYFDPIEFNLVTGWQTINGKKYYFDINTGAALISYKIINGKHFYFNNDGVMQLGVFKGPDGFEYFAPANTQNNNIEGQAIVYQSKFLTLNGKKYYFDNDSKAVTGWRIINNEKYYFNPNNAIAAVGLQVIDNNKYYFNPDTAIISKGWQTVNGSRYYFDTDTAIAFNGYKTIDGKHFYFDSDCVVKIGVFSTSNGFEYFAPANTYNNNIEGQAIVYQSKFLTLNGKKYYFDNNSKAVTGWQTIDSKKYYFNTNTAEAATGWQTIDGKKYYFNTNTAEAATGWQTIDGKKYYFNTNTAIASTGYTIINGKHFYFNTDGIMQIGVFKGPNGFEYFAPANTDANNIEGQAILYQNEFLTLNGKKYYFGSDSKAVTGWRIINNKKYYFNPNNAIAAIHLCTINNDKYYFSYDGILQNGYITIERNNFYFDANNESKMVTGVFKGPNGFEYFAPANTHNNNIEGQAIVYQNKFLTLNGKKYYFDNDSKAVTGWQTIDGKKYYFNLNTAEAATGWQTIDGKKYYFNLNTAEAATGWQTIDGKKYYFNTNTFIASTGYTSINGKHFYFNTDGIMQIGVFKGPNGFEYFAPANTHNNNIEGQAILYQNKFLTLNGKKYYFGSDSKAVTGLRTIDGKKYYFNTNTAVAVTGWQTINGKKYYFNTNTSIASTGYTIISGKHFYFNTDGIMQIGVFKGPDGFEYFAPANTDANNIEGQAIRYQNRFLYLHDNIYYFGNNSKAATGWVTIDGNRYYFEPNTAMGANGYKTIDNKNFYFRNGLPQIGVFKGSNGFEYFAPANTDANNIEGQAIRYQNRFLHLLGKIYYFGNNSKAVTGWQTINGKVYYFMPDTAMAAAGGLFEIDGVIYFFGVDGVKAPGIYG

SEQ ID NO: 9 - protein, 204 aa, Clostridium difficile
RYYFDTDTAIAFNGYKTIDGKHFYFDSDCVVKIGVFSTSNGFEYFAPANTYNNNIEGQAIVYQSKFLTLNGKKYYFDNNSKAVTGWQTIDSKKYYFNTNTAEAATGWQTIDGKKYYFNTNTAEAATGWQTIDGKKYYFNTNTAIASTGYTIINGKHFYFNTDGIMQIGVFKGPNGFEYFAPANTDANNIEGQAILYQNEFLTLN

SEQ ID NO: 10 - protein, 457 aa, Clostridium difficile
ILQNGYITIERNNFYFDANNESKMVTGVFKGPNGFEYFAPANTHNNNIEGQAIVYQNKFLTLNGKKYYFDNDSKAVTGWQTIDGKKYYFNLNTAEAATGWQTIDGKKYYFNLNTAEAATGWQTIDGKKYYFNTNTFIASTGYTSINGKHFYFNTDGIMQIGVFKGPNGFEYFAPANTHNNNIEGQAILYQNKFLTLNGKKYYFGSDSKAVTGLRTIDGKKYYFNTNTAVAVTGWQTINGKKYYFNTNTSIASTGYTIISGKHFYFNTDGIMQIGVFKGPDGFEYFAPANTDANNIEGQAIRYQNRFLYLHDNIYYFGNNSKAATGWVTIDGNRYYFEPNTAMGANGYKTIDNKNFYFRNGLPQIGVFKGSNGFEYFAPANTDANNIEGQAIRYQNRFLHLLGKIYYFGNNSKAVTGWQTINGKVYYFMPDTAMAAAGGLFEIDGVIYFFGVDGVKAP

SEQ ID NO: 11 - protein, 320 aa, Clostridium difficile
ASTGYTSINGKHFYFNTDGIMQIGVFKGPNGFEYFAPANTHNNNIEGQAILYQNKFLTLNGKKYYFGSDSKAVTGLRTIDGKKYYFNTNTAVAVTGWQTINGKKYYFNTNTSIASTGYTIISGKHFYFNTDGIMQIGVFKGPDGFEYFAPANTDANNIEGQAIRYQNRFLYLHDNIYYFGNNSKAATGWVTIDGNRYYFEPNTAMGANGYKTIDNKNFYFRNGLPQIGVFKGSNGFEYFAPANTDANNIEGQAIRYQNRFLHLLGKIYYFGNNSKAVTGWQTINGKVYYFMPDTAMAAAGGLFEIDGVIYFFGVDGVKAP

SEQ ID NO: 12 - protein, 864 aa, Clostridium difficile
FDPIEFNLVTGWQTINGKKYYFDINTGAALISYKIINGKHFYFNNDGVMQLGVFKGPDGFEYFAPANTQNNNIEGQAIVYQSKFLTLNGKKYYFDNDSKAVTGWRIINNEKYYFNPNNAIAAVGLQVIDNNKYYFNPDTAIISKGWQTVNGSRYYFDTDTAIAFNGYKTIDGKHFYFDSDCVVKIGVFSTSNGFEYFAPANTYNNNIEGQAIVYQSKFLTLNGKKYYFDNNSKAVTGWQTIDSKKYYFNTNTAEAATGWQTIDGKKYYFNTNTAEAATGWQTIDGKKYYFNTNTAIASTGYTIINGKHFYFNTDGIMQIGVFKGPNGFEYFAPANTDANNIEGQAILYQNEFLTLNGKKYYFGSDSKAVTGWRIINNKKYYFNPNNAIAAIHLCTINNDKYYFSYDGILQNGYITIERNNFYFDANNESKMVTGVFKGPNGFEYFAPANTHNNNIEGQAIVYQNKFLTLNGKKYYFDNDSKAVTGWQTIDGKKYYFNLNTAEAATGWQTIDGKKYYFNLNTAEAATGWQTIDGKKYYFNTNTFIASTGYTSINGKHFYFNTDGIMQIGVFKGPNGFEYFAPANTHNNNIEGQAILYQNKFLTLNGKKYYFGSDSKAVTGLRTIDGKKYYFNTNTAVAVTGWQTINGKKYYFNTNTSIASTGYTIISGKHFYFNTDGIMQIGVFKGPDGFEYFAPANTDANNIEGQAIRYQNRFLYLHDNIYYFGNNSKAATGWVTIDGNRYYFEPNTAMGANGYKTIDNKNFYFRNGLPQIGVFKGSNGFEYFAPANTDANNIEGQAIRYQNRFLHLLGKIYYFGNNSKAVTGWQTINGKVYYFMPDTAMAAAGGLFEIDGVIYFFGVDGVKAP

SEQ ID NO: 13 - protein, 403 aa, Clostridium difficile
YQNKFLTLNGKKYYFDNDSKAVTGWQTIDGKKYYFNLNTAEAATGWQTIDGKKYYFNLNTAEAATGWQTIDGKKYYFNTNTFIASTGYTSINGKHFYFNTDGIMQIGVFKGPNGFEYFAPANTHNNNIEGQAILYQNKFLTLNGKKYYFGSDSKAVTGLRTIDGKKYYFNTNTAVAVTGWQTINGKKYYFNTNTSIASTGYTIISGKHFYFNTDGIMQIGVFKGPDGFEYFAPANTDANNIEGQAIRYQNRFLYLHDNIYYFGNNSKAATGWVTIDGNRYYFEPNTAMGANGYKTIDNKNFYFRNGLPQIGVFKGSNGFEYFAPANTDANNIEGQAIRYQNRFLHLLGKIYYFGNNSKAVTGWQTINGKVYYFMPDTAMAAAGGLFEIDGVIYFFGVDGVKAP

SEQ ID NO: 14 - protein, 872 aa, Clostridium difficile
SLFYFDPIEFNLVTGWQTINGKKYYFDINTGAALISYKIINGKHFYFNNDGVMQLGVFKGPDGFEYFAPANTQNNNIEGQAIVYQSKFLTLNGKKYYFDNDSKAVTGWRIINNEKYYFNPNNAIAAVGLQVIDNNKYYFNPDTAIISKGWQTVNGSRYYFDTDTAIAFNGYKTIDGKHFYFDSDCVVKIGVFSTSNGFEYFAPANTYNNNIEGQAIVYQSKFLTLNGKKYYFDNNSKAVTGWQTIDSKKYYFNTNTAEAATGWQTIDGKKYYFNTNTAEAATGWQTIDGKKYYFNTNTAIASTGYTIINGKHFYFNTDGIMQIGVFKGPNGFEYFAPANTDANNIEGQAILYQNEFLTLNGKKYYFGSDSKAVTGWRIINNKKYYFNPNNAIAAIHLCTINNDKYYFSYDGILQNGYITIERNNFYFDANNESKMVTGVFKGPNGFEYFAPANTHNNNIEGQAIVYQNKFLTLNGKKYYFDNDSKAVTGWQTIDGKKYYFNLNTAEAATGWQTIDGKKYYFNLNTAEAATGWQTIDGKKYYFNTNTFIASTGYTSINGKHFYFNTDGIMQIGVFKGPNGFEYFAPANTHNNNIEGQAILYQNKFLTLNGKKYYFGSDSKAVTGLRTIDGKKYYFNTNTAVAVTGWQTINGKKYYFNTNTSIASTGYTIISGKHFYFNTDGIMQIGVFKGPDGFEYFAPANTDANNIEGQAIRYQNRFLYLHDNIYYFGNNSKAATGWVTIDGNRYYFEPNTAMGANGYKTIDNKNFYFRNGLPQIGVFKGSNGFEYFAPANTDANNIEGQAIRYQNRFLHLLGKIYYFGNNSKAVTGWQTINGKVYYFMPDTAMAAAGGLFEIDGVIYFFGVDGVKAPGIYG

SEQ ID NO: 15 - protein, 743 aa, Clostridium difficile
AVGLQVIDNNKYYFNPDTAIISKGWQTVNGSRYYFDTDTAIAFNGYKTIDGKHFYFDSDCVVKIGVFSTSNGFEYFAPANTYNNNIEGQAIVYQSKFLTLNGKKYYFDNNSKAVTGWQTIDSKKYYFNTNTAEAATGWQTIDGKKYYFNTNTAEAATGWQTIDGKKYYFNTNTAIASTGYTIINGKHFYFNTDGIMQIGVFKGPNGFEYFAPANTDANNIEGQAILYQNEFLTLNGKKYYFGSDSKAVTGWRIINNKKYYFNPNNAIAAIHLCTINNDKYYFSYDGILQNGYITIERNNFYFDANNESKMVTGVFKGPNGFEYFAPANTHNNNIEGQAIVYQNKFLTLNGKKYYFDNDSKAVTGWQTIDGKKYYFNLNTAEAATGWQTIDGKKYYFNLNTAEAATGWQTIDGKKYYFNTNTFIASTGYTSINGKHFYFNTDGIMQIGVFKGPNGFEYFAPANTHNNNIEGQAILYQNKFLTLNGKKYYFGSDSKAVTGLRTIDGKKYYFNTNTAVAVTGWQTINGKKYYFNTNTSIASTGYTIISGKHFYFNTDGIMQIGVFKGPDGFEYFAPANTDANNIEGQAIRYQNRFLYLHDNIYYFGNNSKAATGWVTIDGNRYYFEPNTAMGANGYKTIDNKNFYFRNGLPQIGVFKGSNGFEYFAPANTDANNIEGQAIRYQNRFLHLLGKIYYFGNNSKAVTGWQTINGKVYYFMPDTAMAAAGGLFEIDGVIYFFGVDGVKAP

SEQ ID NO: 16 - protein, 816 aa, Clostridium difficile
MQLGVFKGPDGFEYFAPANTQNNNIEGQAIVYQSKFLTLNGKKYYFDNDSKAVTGWRIINNEKYYFNPNNAIAAVGLQVIDNNKYYFNPDTAIISKGWQTVNGSRYYFDTDTAIAFNGYKTIDGKHFYFDSDCVVKIGVFSTSNGFEYFAPANTYNNNIEGQAIVYQSKFLTLNGKKYYFDNNSKAVTGWQTIDSKKYYFNTNTAEAATGWQTIDGKKYYFNTNTAEAATGWQTIDGKKYYFNTNTAIASTGYTIINGKHFYFNTDGIMQIGVFKGPNGFEYFAPANTDANNIEGQAILYQNEFLTLNGKKYYFGSDSKAVTGWRIINNKKYYFNPNNAIAAIHLCTINNDKYYFSYDGILQNGYITIERNNFYFDANNESKMVTGVFKGPNGFEYFAPANTHNNNIEGQAIVYQNKFLTLNGKKYYFDNDSKAVTGWQTIDGKKYYFNLNTAEAATGWQTIDGKKYYFNLNTAEAATGWQTIDGKKYYFNTNTFIASTGYTSINGKHFYFNTDGIMQIGVFKGPNGFEYFAPANTHNNNIEGQAILYQNKFLTLNGKKYYFGSDSKAVTGLRTIDGKKYYFNTNTAVAVTGWQTINGKKYYFNTNTSIASTGYTIISGKHFYFNTDGIMQIGVFKGPDGFEYFAPANTDANNIEGQAIRYQNRFLYLHDNIYYFGNNSKAATGWVTIDGNRYYFEPNTAMGANGYKTIDNKNFYFRNGLPQIGVFKGSNGFEYFAPANTDANNIEGQAIRYQNRFLHLLGKIYYFGNNSKAVTGWQTINGKVYYFMPDTAMAAAGGLFEIDGVIYFFGVDGVKAP

SEQ ID NO: 17 - protein, 767 aa, Clostridium difficile
MSLVNRKQLEKMANVRFRTQEDEYVAILDALEEYHNMSENTVVEKYLKLKDINSLTDIYIDTYKKSGRNKALKKFKEYLVTEVLELKNNNLTPVEKNLHFVWIGGQINDTAINYINQWKDVNSDYNVNVFYDSNAFLINTLKKTVVESAINDTLESFRENLNDPRFDYNKFFRKRMEIIYDKQKNFINYYKAQREENPELIIDDIVKTYLSNEYSKEIDELNTYIEESLNKITQNSGNDVRNFEEFKNGESFNLYEQELVERWNLAAASDILRISALKEIGGMYLDVDMLPGIQPDLFESIEKPSSVTVDFWEMTKLEAIMKYKEYIPEYTSEHFDMLDEEVQSSFESVLASKSDKSEIFSSLGDMEASPLEVKIAFNSKGIINQGLISVKDSYCSNLIVKQIENRYKILNNSLNPAISEDNDFNTTTNTFIDSIMAEANADNGRFMMELGKYLRVGFFPDVKTTINLSGPEAYAAAYQDLLMFKEGSMNIHLIEADLRNFEISKTNISQSTEQEMASLWSFDDARAKAQFEEYKRNYFEGSLGEDDNLDFSQNIVVDKEYLLEKISSLARSSERGYIHYIVQLQGDKISYEAACNLFAKTPYDSVLFQKNIEDSEIAYYYNPGDGEIQEIDKYKIPSIISDRPKIKLTFIGHGKDEFNTDIFAGFDVDSLSTEIEAAIDLAKEDISPKSIEINLLGCNMFSYSINVEETYPGKLLLKVKDKISELMPSISQDSIIVSANQYEVRINSEGRRELLDHSGEWINKEES

SEQ ID NO: 18 - protein, 543 aa, Clostridium difficile
MSLVNRKQLEKMANVRFRTQEDEYVAILDALEEYHNMSENTVVEKYLKLKDINSLTDIYIDTYKKSGRNKALKKFKEYLVTEVLELKNNNLTPVEKNLHFVWIGGQINDTAINYINQWKDVNSDYNVNVFYDSNAFLINTLKKTVVESAINDTLESFRENLNDPRFDYNKFFRKRMEIIYDKQKNFINYYKAQREENPELIIDDIVKTYLSNEYSKEIDELNTYIEESLNKITQNSGNDVRNFEEFKNGESFNLYEQELVERWNLAAASDILRISALKEIGGMYLDVDMLPGIQPDLFESIEKPSSVTVDFWEMTKLEAIMKYKEYIPEYTSEHFDMLDEEVQSSFESVLASKSDKSEIFSSLGDMEASPLEVKIAFNSKGIINQGLISVKDSYCSNLIVKQIENRYKILNNSLNPAISEDNDFNTTTNTFIDSIMAEANADNGRFMMELGKYLRVGFFPDVKTTINLSGPEAYAAAYQDLLMFKEGSMNIHLIEADLRNFEISKTNISQSTEQEMASLWSFDDARAKAQFEEYKRNYFEGSL

SEQ ID NO: 19 - protein, 224 aa, Clostridium difficile
GEDDNLDFSQNIVVDKEYLLEKISSLARSSERGYIHYIVQLQGDKISYEAACNLFAKTPYDSVLFQKNIEDSEIAYYYNPGDGEIQEIDKYKIPSIISDRPKIKLTFIGHGKDEFNTDIFAGFDVDSLSTEIEAAIDLAKEDISPKSIEINLLGCNMFSYSINVEETYPGKLLLKVKDKISELMPSISQDSIIVSANQYEVRINSEGRRELLDHSGEWINKEES

SEQ ID NO: 20 - protein, 1066 aa, Clostridium difficile
IIKDISSKEYISFNPKENKITVKSKNLPELSTLLQEIRNNSNSSDIELEEKVMLTECEINVISNIDTQIVEERIEEAKNLTSDSINYIKDEFKLIESISDALCDLKQQNELEDSHFISFEDISETDEGFSIRFINKETGESIFVETEKTIFSEYANHITEEISKIKGTIFDTVNGKLVKKVNLDTTHEVNTLNAAFFIQSLIEYNSSKESLSNLSVAMKVQVYAQLFSTGLNTITDAAKVVELVSTALDETIDLLPTLSEGLPIIATIIDGVSLGAAIKELSETSDPLLRQEIEAKIGIMAVNLTTATTAIITSSLGIASGFSILLVPLAGISAGIPSLVNNELVLRDKATKVVDYFKHVSLVETEGVFTLLDDKIMMPQDDLVISEIDFNNNSIVLGKCEIWRMEGGSGHTVTDDIDHFFSAPSITYREPHLSIYDVLEVQKEELDLSKDLMVLPNAPNRVFAWETGWTPGLRSLENDGTKLLDRIRDNYEGEFYWRYFAFIADALITTLKPRYEDTNIRINLDSNTRSFIVPIITTEYIREKLSYSFYGSGGTYALSLSQYNMGINIELSESDVWIIDVDNVVRDVTIESDKIKKGDLIEGILSTLSIEENKIILNSHEINFSGEVNGSNGFVSLTFSILEGINAIIEVDLLSKSYKLLISGELKILMLNSNHIQQKIDYIGFNSELQKNIPYSFVDSEGKENGFINGSTKEGLFVSELPDVVLISKVYMDDSKPSFGYYSNNLKDVKVITKDNVNILTGYYLKDDIKISLSLTLQDEKTIKLNSVHLDESGVAEILKFMNRKGNTNTSDSLMSFLESMNIKSIFVNFLQSNIKFILDANFIISGTTSIGQFEFICDENDNIQPYFIKFNTLETNYTLYVGNRQNMIVEPNYDLDDSGDISSTVINFSQKYLYGIDSCVNKVVISPNIYTDEINITPVYETNNTYPEVIVLDANYINEKINVNINDLSIRYVWSNDGNDFILMSTSEENKVSQVKIRFVNVFKDKTLANKLSFNFSDKQDVPVSEIILSFTPSYYEDGLIGYDLGLVSLYNEKFYINNFGMMVS

SEQ ID NO: 21 - protein, 514 aa, Clostridium difficile
ITGFVTVGDDKYYFNPINGGAASIGETIIDDKNYYFNQSGVLQTGVFSTEDGFKYFAPANTLDENLEGEAIDFTGKLIIDENIYYFDDNYRGAVEWKELDGEMHYFSPETGKAFKGLNQIGDYKYYFNSDGVMQKGFVSINDNKHYFDDSGVMKVGYTEIDGKHFYFAENGEMQIGVFNTEDGFKYFAHHNEDLGNEEGEEISYSGILNFNNKIYYFDDSFTAVVGWKDLEDGSKYYFDEDTAEAYIGLSLINDGQYYFNDDGIMQVGFVTINDKVFYFSDSGIIESGVQNIDDNYFYIDDNGIVQIGVFDTSDGYKYFAPANTVNDNIYGQAVEYSGLVRVGEDVYYFGETYTIETGWIYDMENESDKYYFNPETKKACKGINLIDDIKYYFDEKGIMRTGLISFENNNYYFNENGEMQFGYINIEDKMFYFGEDGVMQIGVFNTPDGFKYFAHQNTLDENFEGESINYTGWLDLDEKRYYFTDEYIAATGSVIIDGEEYYFDPDTAQLVISE

SEQ ID NO: 22 - protein, 210 aa, Clostridium difficile
VQIGVFDTSDGYKYFAPANTVNDNIYGQAVEYSGLVRVGEDVYYFGETYTIETGWIYDMENESDKYYFNPETKKACKGINLIDDIKYYFDEKGIMRTGLISFENNNYYFNENGEMQFGYINIEDKMFYFGEDGVMQIGVFNTPDGFKYFAHQNTLDENFEGESINYTGWLDLDEKRYYFTDEYIAATGSVIIDGEEYYFDPDTAQLVISE

SEQ ID NO: 23 - protein, 311 aa, Clostridium difficile
YSGILNFNNKIYYFDDSFTAVVGWKDLEDGSKYYFDEDTAEAYIGLSLINDGQYYFNDDGIMQVGFVTINDKVFYFSDSGIIESGVQNIDDNYFYIDDNGIVQIGVFDTSDGYKYFAPANTVNDNIYGQAVEYSGLVRVGEDVYYFGETYTIETGWIYDMENESDKYYFNPETKKACKGINLIDDIKYYFDEKGIMRTGLISFENNNYYFNENGEMQFGYINIEDKMFYFGEDGVMQIGVFNTPDGFKYFAHQNTLDENFEGESINYTGWLDLDEKRYYFTDEYIAATGSVIIDGEEYYFDPDTAQLVISE

SEQ ID NO: 24 - protein, 872 aa, Clostridium difficile
HMSLVNRKQLEKMANVRFRTQEDEYVAILDALEEYHNMSENTVVEKYLKLKDINSLTDIYIDTYKKSGRNKALKKFKEYLVTEVLELKNNNLTPVEKNLHFVWIGGQINDTAINYINQWKDVNSDYNVNVFYDSNAFLINTLKKTVVESAINDTLESFRENLNDPRFDYNKFFRKRMEIIYDKQKNFINYYKAQREENPELIIDDIVKTYLSNEYSKEIDELNTYIEESLNKITQNSGNDVRNFEEFKNGESFNLYEQELVERWNLAAASAILAISALKEIGGMALAVAMLPGIQPDLFESIEKPSSVTVDFWEMTKLEAIMKYKEYIPEYTSEHFDMLDEEVQSSFESVLASKSDKSEIFSSLGDMEASPLEVKIAFNSKGIINQGLISVKDSYCSNLIVKQIENRYKILNNSLNPAISEDNDFNTTTNTFIDSIMAEANADNGRFMMELGKYLRVGFFPDVKTTINLSGPEAYAAAYQDLLMFKEGSMNIHLIEADLRNFEISKTNISQSTEQEMASLWSFDDARAKAQFEEYKRNYFEGSLGSGGGGASTGYTSINGKHFYFNTDGIMQIGVFKGPNGFEYFAPANTHNNNIEGQAILYQNKFLTLNGKKYYFGSDSKAVTGLRTIDGKKYYFNTNTAVAVTGWQTINGKKYYFNTNTSIASTGYTIISGKHFYFNTDGIMQIGVFKGPDGFEYFAPANTDANNIEGQAIRYQNRFLYLHDNIYYFGNNSKAATGWVTIDGNRYYFEPNTAMGANGYKTIDNKNFYFRNGLPQIGVFKGSNGFEYFAPANTDANNIEGQAIRYQNRFLHLLGKIYYFGNNSKAVTGWQTINGKVYYFMPDTAMAAAGGLFEIDGVIYFFGVDGVKAPLE

SEQ ID NO: 25 - protein, 6 aa, Artificial Sequence
  Linker
GSGGGG

SEQ ID NO: 26 - protein, 8 aa, Artificial Sequence
  Linker
GSGSGGGG

SEQ ID NO: 27 - protein, 5 aa, Artificial Sequence
  Linker
AAALE

SEQ ID NO: 28 - protein, 26 aa, Artificial Sequence
  IC-31
ICICICICICICICICICICICICIC

SEQ ID NO: 29 - protein, 11 aa, Artificial Sequence
  Polycationic polymer
KLKLLLLLKLK

SEQ ID NO: 30 - DNA, 8133 bp, Artificial Sequence
  Clostridium difficile
atgtctttaatatctaaagaagagttaataaaactcgcatatagcattagaccaagagaaaatgagtataaaactatactaactaatttagacgaatataataagttaactacaaacaataatgaaaataaatatttacaattaaaaaaactaaatgaatcaattgatgtttttatgaataaatataaaacttcaagcagaaatagagcactctctaatctaaaaaaagatatattaaaagaagtaattcttattaaaaattccaatacaagccctgtagaaaaaaatttacattttgtatggataggtggagaagtcagtgatattgctcttgaatacataaaacaatgggctgatattaatgcagaatataatattaaactgtggtatgatagtgaagcattcttagtaaatacactaaaaaaggctatagttgaatcttctaccactgaagcattacagctactagaggaagagattcaaaatcctcaatttgataatatgaaattttacaaaaaaaggatggaatttatatatgatagacaaaaaaggtttataaattattataaatctcaaatcaataaacctacagtacctacaatagatgatattataaagtctcatctagtatctgaatataatagagatgaaactgtattagaatcatatagaacaaattctttgagaaaaataaatagtaatcatgggatagatatcagggctaatagtttgtttacagaacaagagttattaaatatttatagtcaggagttgttaaatcgtggaaatttagctgcagcatctgacatagtaagattattagccctaaaaaattttggcggagtatatttagatgttgatatgcttccaggtattcactctgatttatttaaaacaatatctagacctagctctattggactagaccgttgggaaatgataaaattagaggctattatgaagtataaaaaatatataaataattatacatcagaaaactttgataaacttgatcaacaattaaaagataattttaaactcattatagaaagtaaaagtgaaaaatctgagatattttctaaattagaaaatttaaatgtatctgatcttgaaattaaaatagctttcgctttaggcagtgttataaatcaagccttgatatcaaaacaaggttcatatcttactaacctagtaatagaacaagtaaaaaatagatatcaatttttaaaccaacaccttaacccagccatagagtctgataataacttcacagatactactaaaatttttcatgattcattatttaattcagctaccgcagaaaactctatgtttttaacaaaaatagcaccatacttacaagtaggttttatgccagaagctcgctccacaataagtttaagtggtccaggagcttatgcgtcagcttactatgatttcataaatttacaagaaaatactatagaaaaaactttaaaagcatcagatttaatagaatttaaattcccagaaaataatctatctcaattgacagaacaagaaataaatagtctatggagctttgatcaagcaagtgcaaaatatcaatttgagaaatatgtaagagattatactggtggatctctttctgaagacaatggggtagactttaataaaaatactgccctcgacaaaaactatttattaaataataaaattccatcaaacaatgtagaagaagctggaagtaaaaattatgttcattatatcatacagttacaaggagatgatataagttatgaagcaacatgcaatttattttctaaaaatcctaaaaatagtattattatacaacgaaatatgaatgaaagtgcaaaaagctactttttaagtgatgatggagaatctattttagaattaaataaatataggatacctgaaagattaaaaaataaggaaaaagtaaaagtaacctttattggacatggtaaagatgaattcaacacaagcgaatttgctagattaagtgtagattcactttccaatgagataagttcatttttagataccataaaattagatatatcacctaaaaatgtagaagtaaacttacttggatgtaatatgtttagttatgattttaatgttgaagaaacttatcctgggaagttgctattaagtattatggacaaaattacttccactttacctgatgtaaataaaaattctattactataggagcaaatcaatatgaagtaagaattaatagtgagggaagaaaagaacttctggctcactcaggtaaatggataaataaagaagaagctattatgagcgatttatctagtaaagaatacattttttttgattctatagataataagctaaaagcaaagtccaagaatattccaggattagcatcaatatcagaagatataaaaacattattacttgatgcaagtgttagtcctgatacaaaatttattttaaataatcttaagcttaatattgaatcttctattggtgattacatttattatgaaaaattagagcctgttaaaaatataattcacaattctatagatgatttaatagatgagttcaatctacttgaaaatgtatctgatgaattatatgaattaaaaaaattaaataatctagatgagaagtatttaatatcttttgaagatatctcaaaaaataattcaacttactctgtaagatttattaacaaaagtaatggtgagtcagtttatgtagaaacagaaaaagaaattttttcaaaatatagcgaacatattacaaaagaaataagtactataaagaatagtataattacagatgttaatggtaatttattggataatatacagttagatcatacttctcaagttaatacattaaacgcagcattctttattcaatcattaatagattatagtagcaataaagatgtactgaatgatttaagtacctcagttaaggttcaactttatgctcaactatttagtacaggtttaaatactatatatgactctatccaattagtaaatttaatatcaaatgcagtaaatgatactataaatgtactacctacaataacagaggggatacctattgtatctactatattagacggaataaacttaggtgcagcaattaaggaattactagacgaacatgacccattactaaaaaaagaattagaagctaaggtgggtgttttagcaataaatatgtcattatctatagctgcaactgtagcttcaattgttggaataggtgctgaagttactattttcttattacctatagctggtatatctgcaggaataccttcattagttaataatgaattaatattgcatgataaggcaacttcagtggtaaactattttaatcatttgtctgaatctaaaaaatatggccctcttaaaacagaagatgataaaattttagttcctattgatgatttagtaatatcagaaatagattttaataataattcgataaaactaggaacatgtaatatattagcaatggaggggggatcaggacacacagtgactggtaatatagatcactttttctcatctccatctataagttctcatattccttcattatcaatttattctgcaataggtatagaaacagaaaatctagatttttcaaaaaaaataatgatgttacctaatgctccttcaagagtgttttggtgggaaactggagcagttccaggtttaagatcattggaaaatgacggaactagattacttgattcaataagagatttatacccaggtaaattttactggagattctatgcttttttcgattatgcaataactacattaaaaccagtttatgaagacactaatattaaaattaaactagataaagatactagaaacttcataatgccaactataactactaacgaaattagaaacaaattatcttattcatttgatggagcaggaggaacttactctttattattatcttcatatccaatatcaacgaatataaatttatctaaagatgatttatggatatttaatattgataatgaagtaagagaaatatctatagaaaatggtactattaaaaaaggaaagttaataaaagatgttttaagtaaaattgatataaataaaaataaacttattataggcaatcaaacaatagatttttcaggcgatatagataataaagatagatatatattcttgacttgtgagttagatgataaaattagtttaataatagaaataaatcttgttgcaaaatcttatagtttgttattgtctggggataaaaattatttgatatccaatttatctaatattattgagaaaatcaatactttaggcctagatagtaaaaatatagcgtacaattacactgatgaatctaataataaatattttggagctatatctaaaacaagtcaaaaaagcataatacattataaaaaagacagtaaaaatatattagaattttataatgacagtacattagaatttaacagtaaagattttattgctgaagatataaatgtatttatgaaagatgatattaatactataacaggaaaatactatgttgataataatactgataaaagtatagatttctctatttctttagttagtaaaaatcaagtaaaagtaaatggattatatttaaatgaatccgtatactcatcttaccttgattttgtgaaaaattcagatggacaccataatacttctaattttatgaatttatttttggacaatataagtttctggaaattgtttgggtttgaaaatataaattttgtaatcgataaatactttacccttgttggtaaaactaatcttggatatgtagaatttatttgtgacaataataaaaatatagatatatattttggtgaatggaaaacatcgtcatctaaaagcactatatttagcggaaatggtagaaatgttgtagtagagcctatatataatcctgatacgggtgaagatatatctacttcactagatttttcctatgaacctctctatggaatagatagatatatcaataaagtattgatagcacctgatttatatacaagtttaataaatattaataccaattattattcaaatgagtactaccctgagattatagttcttaacccaaatacattccacaaaaaagtaaatataaatttagatagttcttcttttgagtataaatggtctacagaaggaagtgactttattttagttagatacttagaagaaagtaataaaaaaatattacaaaaaataagaatcaaaggtatcttatctaatactcaatcatttaataaaatgagtatagattttaaagatattaaaaaactatcattaggatatataatgagtaattttaaatcatttaattctgaaaatgaattagatagagatcatttaggatttaaaataatagataataaaacttattactatgatgaagatagtaaattagttaaaggattaatcaatataaataattcattattctattttgatcctatagaatttaacttagtaactggatggcaaactatcaatggtaaaaaatattattttgatataaatactggagcagctttaattagttataaaattattaatggtaaacacttttattttaataatgatggtgtgatgcagttgggagtatttaaaggacctgatggatttgaatattttgcacctgccaatactcaaaataataacatagaaggtcaggctatagtttatcaaagtaaattcttaactttgaatggcaaaaaatattattttgataatgactcaaaagcagtcactggatggagaattattaacaatgagaaatattactttaatcctaataatgctattgctgcagtcggattgcaagtaattgacaataataagtattatttcaatcctgacactgctatcatctcaaaaggttggcagactgttaatggtagtagatactactttgatactgataccgctattgcctttaatggttataaaactattgatggtaaacacttttattttgatagtgattgtgtagtgaaaataggtgtgtttagtacctctaatggatttgaatattttgcacctgctaatacttataataataacatagaaggtcaggctatagtttatcaaagtaaattcttaactttgaatggtaaaaaatattactttgataataactcaaaagcagttaccggatggcaaactattgatagtaaaaaatattactttaatactaacactgctgaagcagctactggatggcaaactattgatggtaaaaaatattactttaatactaacactgctgaagcagctactggatggcaaactattgatggtaaaaaatattactttaatactaacactgctatagcttcaactggttatacaattattaatggtaaacatttttattttaatactgatggtattatgcagataggagtgtttaaaggacctaatggatttgaatattttgcacctgctaatacggatgctaacaacatagaaggtcaagctatactttaccaaaatgaattcttaactttgaatggtaaaaaatattactttggtagtgactcaaaagcagttactggatggagaattattaacaataagaaatattactttaatcctaataatgctattgctgcaattcatctatgcactataaataatgacaagtattactttagttatgatggaattcttcaaaatggatatattactattgaaagaaataatttctattttgatgctaataatgaatctaaaatggtaacaggagtatttaaaggacctaatggatttgagtattttgcacctgctaatactcacaataataacatagaaggtcaggctatagtttaccagaacaaattcttaactttgaatggcaaaaaatattattttgataatgactcaaaagcagttactggatggcaaaccattgatggtaaaaaatattactttaatcttaacactgctgaagcagctactggatggcaaactattgatggtaaaaaatattactttaatcttaacactgctgaagcagctactggatggcaaactattgatggtaaaaaatattactttaatactaacactttcatagcctcaactggttatacaagtattaatggtaaacatttttattttaatactgatggtattatgcagataggagtgtttaaaggacctaatggatttgaatactttgcacctgctaatactcataataataacatagaaggtcaagctatactttaccaaaataaattcttaactttgaatggtaaaaaatattactttggtagtgactcaaaagcagttaccggattgcgaactattgatggtaaaaaatattactttaatactaacactgctgttgcagttactggatggcaaactattaatggtaaaaaatactactttaatactaacacttctatagcttcaactggttatacaattattagtggtaaacatttttattttaatactgatggtattatgcagataggagtgtttaaaggacctgatggatttgaatactttgcacctgctaatacagatgctaacaatatagaaggtcaagctatacgttatcaaaatagattcctatatttacatgacaatatatattattttggtaataattcaaaagcagctactggttgggtaactattgatggtaatagatattacttcgagcctaatacagctatgggtgcgaatggttataaaactattgataataaaaatttttactttagaaatggtttacctcagataggagtgtttaaagggtctaatggatttgaatactttgcacctgctaatacggatgctaacaatatagaaggtcaagctatacgttatcaaaatagattcctacatttacttggaaaaatatattactttggtaataattcaaaagcagttactggatggcaaactattaatggtaaagtatattactttatgcctgatactgctatggctgcagctggtggacttttcgagattgatggtgttatatatttctttggtgttgatggagtaaaagcccctgggatatatggctaa

SEQ ID NO: 31 - DNA, 7101 bp, Clostridium difficile
atgagtttagttaatagaaaacagttagaaaaaatggcaaatgtaagatttcgtactcaagaagatgaatatgttgcaatattggatgctttagaagaatatcataatatgtcagagaatactgtagtcgaaaaatatttaaaattaaaagatataaatagtttaacagatatttatatagatacatataaaaaatctggtagaaataaagccttaaaaaaatttaaggaatatctagttacagaagtattagagctaaagaataataatttaactccagttgagaaaaatttacattttgtttggattggaggtcaaataaatgacactgctattaattatataaatcaatggaaagatgtaaatagtgattataatgttaatgttttttatgatagtaatgcatttttgataaacacattgaaaaaaactgtagtagaatcagcaataaatgatacacttgaatcatttagagaaaacttaaatgaccctagatttgactataataaattcttcagaaaacgtatggaaataatttatgataaacagaaaaatttcataaactactataaagctcaaagagaagaaaatcctgaacttataattgatgatattgtaaagacatatctttcaaatgagtattcaaaggagatagatgaacttaatacctatattgaagaatccttaaataaaattacacagaatagtggaaatgatgttagaaactttgaagaatttaaaaatggagagtcattcaacttatatgaacaagagttggtagaaaggtggaatttagctgctgcttctgacatattaagaatatctgcattaaaagaaattggtggtatgtatttagatgttgatatgttaccaggaatacaaccagacttatttgagtctatagagaaacctagttcagtaacagtggatttttgggaaatgacaaagttagaagctataatgaaatacaaagaatatataccagaatatacctcagaacattttgacatgttagacgaagaagttcaaagtagttttgaatctgttctagcttctaagtcagataaatcagaaatattctcatcacttggtgatatggaggcatcaccactagaagttaaaattgcatttaatagtaagggtattataaatcaagggctaatttctgtgaaagactcatattgtagcaatttaatagtaaaacaaatcgagaatagatataaaatattgaataatagtttaaatccagctattagcgaggataatgattttaatactacaacgaatacctttattgatagtataatggctgaagctaatgcagataatggtagatttatgatggaactaggaaagtatttaagagttggtttcttcccagatgttaaaactactattaacttaagtggccctgaagcatatgcggcagcttatcaagatttattaatgtttaaagaaggcagtatgaatatccatttgatagaagctgatttaagaaactttgaaatctctaaaactaatatttctcaatcaactgaacaagaaatggctagcttatggtcatttgacgatgcaagagctaaagctcaatttgaagaatataaaaggaattattttgaaggttctcttggtgaagatgataatcttgatttttctcaaaatatagtagttgacaaggagtatcttttagaaaaaatatcttcattagcaagaagttcagagagaggatatatacactatattgttcagttacaaggagataaaattagttatgaagcagcatgtaacttatttgcaaagactccttatgatagtgtactgtttcagaaaaatatagaagattcagaaattgcatattattataatcctggagatggtgaaatacaagaaatagacaagtataaaattccaagtataatttctgatagacctaagattaaattaacatttattggtcatggtaaagatgaatttaatactgatatatttgcaggttttgatgtagattcattatccacagaaatagaagcagcaatagatttagctaaagaggatatttctcctaagtcaatagaaataaatttattaggatgtaatatgtttagctactctatcaacgtagaggagacttatcctggaaaattattacttaaagttaaagataaaatatcagaattaatgccatctataagtcaagactctattatagtaagtgcaaatcaatatgaagttagaataaatagtgaaggaagaagagaattattggatcattctggtgaatggataaataaagaagaaagtattataaaggatatttcatcaaaagaatatatatcatttaatcctaaagaaaataaaattacagtaaaatctaaaaatttacctgagctatctacattattacaagaaattagaaataattctaattcaagtgatattgaactagaagaaaaagtaatgttaacagaatgtgagataaatgttatttcaaatatagatacgcaaattgttgaggaaaggattgaagaagctaagaatttaacttctgactctattaattatataaaagatgaatttaaactaatagaatctatttctgatgcactatgtgacttaaaacaacagaatgaattagaagattctcattttatatcttttgaggacatatcagagactgatgagggatttagtataagatttattaataaagaaactggagaatctatatttgtagaaactgaaaaaacaatattctctgaatatgctaatcatataactgaagagatttctaagataaaaggtactatatttgatactgtaaatggtaagttagtaaaaaaagtaaatttagatactacacacgaagtaaatactttaaatgctgcattttttatacaatcattaatagaatataatagttctaaagaatctcttagtaatttaagtgtagcaatgaaagtccaagtttacgctcaattatttagtactggtttaaatactattacagatgcagccaaagttgttgaattagtatcaactgcattagatgaaactatagacttacttcctacattatctgaaggattacctataattgcaactattatagatggtgtaagtttaggtgcagcaatcaaagagctaagtgaaacgagtgacccattattaagacaagaaatagaagctaagataggtataatggcagtaaatttaacaacagctacaactgcaatcattacttcatctttggggatagctagtggatttagtatacttttagttcctttagcaggaatttcagcaggtataccaagcttagtaaacaatgaacttgtacttcgagataaggcaacaaaggttgtagattattttaaacatgtttcattagttgaaactgaaggagtatttactttattagatgataaaataatgatgccacaagatgatttagtgatatcagaaatagattttaataataattcaatagttttaggtaaatgtgaaatctggagaatggaaggtggttcaggtcatactgtaactgatgatatagatcacttcttttcagcaccatcaataacatatagagagccacacttatctatatatgacgtattggaagtacaaaaagaagaacttgatttgtcaaaagatttaatggtattacctaatgctccaaatagagtatttgcttgggaaacaggatggacaccaggtttaagaagcttagaaaatgatggcacaaaactgttagaccgtataagagataactatgaaggtgagttttattggagatattttgcttttatagctgatgctttaataacaacattaaaaccaagatatgaagatactaatataagaataaatttagatagtaatactagaagttttatagttccaataataactacagaatatataagagaaaaattatcatattctttctatggttcaggaggaacttatgcattgtctctttctcaatataatatgggtataaatatagaattaagtgaaagtgatgtttggattatagatgttgataatgttgtgagagatgtaactatagaatctgataaaattaaaaaaggtgatttaatagaaggtattttatctacactaagtattgaagagaataaaattatcttaaatagccatgagattaatttttctggtgaggtaaatggaagtaatggatttgtttctttaacattttcaattttagaaggaataaatgcaattatagaagttgatttattatctaaatcatataaattacttatttctggcgaattaaaaatattgatgttaaattcaaatcatattcaacagaaaatagattatataggattcaatagcgaattacagaaaaatataccatatagctttgtagatagtgaaggaaaagagaatggttttattaatggttcaacaaaagaaggtttatttgtatctgaattacctgatgtagttcttataagtaaggtttatatggatgatagtaagccttcatttggatattatagtaataatttgaaagatgtcaaagttataactaaagataatgttaatatattaacaggttattatcttaaggatgatataaaaatctctctttctttgactctacaagatgaaaaaactataaagttaaatagtgtgcatttagatgaaagtggagtagctgagattttgaagttcatgaatagaaaaggtaatacaaatacttcagattctttaatgagctttttagaaagtatgaatataaaaagtattttcgttaatttcttacaatctaatattaagtttatattagatgctaattttataataagtggtactacttctattggccaatttgagtttatttgtgatgaaaatgataatatacaaccatatttcattaagtttaatacactagaaactaattatactttatatgtaggaaatagacaaaatatgatagtggaaccaaattatgatttagatgattctggagatatatcttcaactgttatcaatttctctcaaaagtatctttatggaatagacagttgtgttaataaagttgtaatttcaccaaatatttatacagatgaaataaatataacgcctgtatatgaaacaaataatacttatccagaagttattgtattagatgcaaattatataaatgaaaaaataaatgttaatatcaatgatctatctatacgatatgtatggagtaatgatggtaatgattttattcttatgtcaactagtgaagaaaataaggtgtcacaagttaaaataagattcgttaatgtttttaaagataagactttggcaaataagctatcttttaactttagtgataaacaagatgtacctgtaagtgaaataatcttatcatttacaccttcatattatgaggatggattgattggctatgatttgggtctagtttctttatataatgagaaattttatattaataactttggaatgatggtatctggattaatatatattaatgattcattatattattttaaaccaccagtaaataatttgataactggatttgtgactgtaggcgatgataaatactactttaatccaattaatggtggagctgcttcaattggagagacaataattgatgacaaaaattattatttcaaccaaagtggagtgttacaaacaggtgtatttagtacagaagatggatttaaatattttgccccagctaatacacttgatgaaaacctagaaggagaagcaattgattttactggaaaattaattattgacgaaaatatttattattttgatgataattatagaggagctgtagaatggaaagaattagatggtgaaatgcactattttagcccagaaacaggtaaagcttttaaaggtctaaatcaaataggtgattataaatactatttcaattctgatggagttatgcaaaaaggatttgttagtataaatgataataaacactattttgatgattctggtgttatgaaagtaggttacactgaaatagatggcaagcatttctactttgctgaaaacggagaaatgcaaataggagtatttaatacagaagatggatttaaatattttgctcatcataatgaagatttaggaaatgaagaaggtgaagaaatctcatattctggtatattaaatttcaataataaaatttactattttgatgattcatttacagctgtagttggatggaaagatttagaggatggttcaaagtattattttgatgaagatacagcagaagcatatataggtttgtcattaataaatgatggtcaatattattttaatgatgatggaattatgcaagttggatttgtcactataaatgataaagtcttctacttctctgactctggaattatagaatctggagtacaaaacatagatgacaattatttctatatagatgataatggtatagttcaaattggtgtatttgatacttcagatggatataaatattttgcacctgctaatactgtaaatgataatatttacggacaagcagttgaatatagtggtttagttagagttggtgaagatgtatattattttggagaaacatatacaattgagactggatggatatatgatatggaaaatgaaagtgataaatattatttcaatccagaaactaaaaaagcatgcaaaggtattaatttaattgatgatataaaatattattttgatgagaagggcataatgagaacgggtcttatatcatttgaaaataataattattactttaatgagaatggtgaaatgcaatttggttatataaatatagaagataagatgttctattttggtgaagatggtgtcatgcagattggagtatttaatacaccagatggatttaaatactttgcacatcaaaatactttggatgagaattttgagggagaatcaataaactatactggttggttagatttagatgaaaagagatattattttacagatgaatatattgcagcaactggttcagttattattgatggtgaggagtattattttgatcctgatacagctcaattagtgattagtgaatag

SEQ ID NO: 32 - DNA, 2307 bp, Clostridium difficile
atgtctttaatatctaaagaagagttaataaaactcgcatatagcattagaccaagagaaaatgagtataaaactatactaactaatttagacgaatataataagttaactacaaacaataatgaaaataaatatttacaattaaaaaaactaaatgaatcaattgatgtttttatgaataaatataaaacttcaagcagaaatagagcactctctaatctaaaaaaagatatattaaaagaagtaattcttattaaaaattccaatacaagccctgtagaaaaaaatttacattttgtatggataggtggagaagtcagtgatattgctcttgaatacataaaacaatgggctgatattaatgcagaatataatattaaactgtggtatgatagtgaagcattcttagtaaatacactaaaaaaggctatagttgaatcttctaccactgaagcattacagctactagaggaagagattcaaaatcctcaatttgataatatgaaattttacaaaaaaaggatggaatttatatatgatagacaaaaaaggtttataaattattataaatctcaaatcaataaacctacagtacctacaatagatgatattataaagtctcatctagtatctgaatataatagagatgaaactgtattagaatcatatagaacaaattctttgagaaaaataaatagtaatcatgggatagatatcagggctaatagtttgtttacagaacaagagttattaaatatttatagtcaggagttgttaaatcgtggaaatttagctgcagcatctgacatagtaagattattagccctaaaaaattttggcggagtatatttagatgttgatatgcttccaggtattcactctgatttatttaaaacaatatctagacctagctctattggactagaccgttgggaaatgataaaattagaggctattatgaagtataaaaaatatataaataattatacatcagaaaactttgataaacttgatcaacaattaaaagataattttaaactcattatagaaagtaaaagtgaaaaatctgagatattttctaaattagaaaatttaaatgtatctgatcttgaaattaaaatagctttcgctttaggcagtgttataaatcaagccttgatatcaaaacaaggttcatatcttactaacctagtaatagaacaagtaaaaaatagatatcaatttttaaaccaacaccttaacccagccatagagtctgataataacttcacagatactactaaaatttttcatgattcattatttaattcagctaccgcagaaaactctatgtttttaacaaaaatagcaccatacttacaagtaggttttatgccagaagctcgctccacaataagtttaagtggtccaggagcttatgcgtcagcttactatgatttcataaatttacaagaaaatactatagaaaaaactttaaaagcatcagatttaatagaatttaaattcccagaaaataatctatctcaattgacagaacaagaaataaatagtctatggagctttgatcaagcaagtgcaaaatatcaatttgagaaatatgtaagagattatactggtggatctctttctgaagacaatggggtagactttaataaaaatactgccctcgacaaaaactatttattaaataataaaattccatcaaacaatgtagaagaagctggaagtaaaaattatgttcattatatcatacagttacaaggagatgatataagttatgaagcaacatgcaatttattttctaaaaatcctaaaaatagtattattatacaacgaaatatgaatgaaagtgcaaaaagctactttttaagtgatgatggagaatctattttagaattaaataaatataggatacctgaaagattaaaaaataaggaaaaagtaaaagtaacctttattggacatggtaaagatgaattcaacacaagcgaatttgctagattaagtgtagattcactttccaatgagataagttcatttttagataccataaaattagatatatcacctaaaaatgtagaagtaaacttacttggatgtaatatgtttagttatgattttaatgttgaagaaacttatcctgggaagttgctattaagtattatggacaaaattacttccactttacctgatgtaaataaaaattctattactataggagcaaatcaatatgaagtaagaattaatagtgagggaagaaaagaacttctggctcactcaggtaaatggataaataaagaagaagct

SEQ ID NO: 33 - DNA, 1623 bp, Clostridium difficile
atgtctttaatatctaaagaagagttaataaaactcgcatatagcattagaccaagagaaaatgagtataaaactatactaactaatttagacgaatataataagttaactacaaacaataatgaaaataaatatttacaattaaaaaaactaaatgaatcaattgatgtttttatgaataaatataaaacttcaagcagaaatagagcactctctaatctaaaaaaagatatattaaaagaagtaattcttattaaaaattccaatacaagccctgtagaaaaaaatttacattttgtatggataggtggagaagtcagtgatattgctcttgaatacataaaacaatgggctgatattaatgcagaatataatattaaactgtggtatgatagtgaagcattcttagtaaatacactaaaaaaggctatagttgaatcttctaccactgaagcattacagctactagaggaagagattcaaaatcctcaatttgataatatgaaattttacaaaaaaaggatggaatttatatatgatagacaaaaaaggtttataaattattataaatctcaaatcaataaacctacagtacctacaatagatgatattataaagtctcatctagtatctgaatataatagagatgaaactgtattagaatcatatagaacaaattctttgagaaaaataaatagtaatcatgggatagatatcagggctaatagtttgtttacagaacaagagttattaaatatttatagtcaggagttgttaaatcgtggaaatttagctgcagcatctgacatagtaagattattagccctaaaaaattttggcggagtatatttagatgttgatatgcttccaggtattcactctgatttatttaaaacaatatctagacctagctctattggactagaccgttgggaaatgataaaattagaggctattatgaagtataaaaaatatataaataattatacatcagaaaactttgataaacttgatcaacaattaaaagataattttaaactcattatagaaagtaaaagtgaaaaatctgagatattttctaaattagaaaatttaaatgtatctgatcttgaaattaaaatagctttcgctttaggcagtgttataaatcaagccttgatatcaaaacaaggttcatatcttactaacctagtaatagaacaagtaaaaaatagatatcaatttttaaaccaacaccttaacccagccatagagtctgataataacttcacagatactactaaaatttttcatgattcattatttaattcagctaccgcagaaaactctatgtttttaacaaaaatagcaccatacttacaagtaggttttatgccagaagctcgctccacaataagtttaagtggtccaggagcttatgcgtcagcttactatgatttcataaatttacaagaaaatactatagaaaaaactttaaaagcatcagatttaatagaatttaaattcccagaaaataatctatctcaattgacagaacaagaaataaatagtctatggagctttgatcaagcaagtgcaaaatatcaatttgagaaatatgtaagagattatactggtggatct

SEQ ID NO: 34 - DNA, 684 bp, Clostridium difficile
tctgaagacaatggggtagactttaataaaaatactgccctcgacaaaaactatttattaaataataaaattccatcaaacaatgtagaagaagctggaagtaaaaattatgttcattatatcatacagttacaaggagatgatataagttatgaagcaacatgcaatttattttctaaaaatcctaaaaatagtattattatacaacgaaatatgaatgaaagtgcaaaaagctactttttaagtgatgatggagaatctattttagaattaaataaatataggatacctgaaagattaaaaaataaggaaaaagtaaaagtaacctttattggacatggtaaagatgaattcaacacaagcgaatttgctagattaagtgtagattcactttccaatgagataagttcatttttagataccataaaattagatatatcacctaaaaatgtagaagtaaacttacttggatgtaatatgtttagttatgattttaatgttgaagaaacttatcctgggaagttgctattaagtattatggacaaaattacttccactttacctgatgtaaataaaaattctattactataggagcaaatcaatatgaagtaagaattaatagtgagggaagaaaagaacttctggctcactcaggtaaatggataaataaagaagaagctctt

SEQ ID NO: 35 - DNA, 3114 bp, Clostridium difficile
atgagcgatttatctagtaaagaatacattttttttgattctatagataataagctaaaagcaaagtccaagaatattccaggattagcatcaatatcagaagatataaaaacattattacttgatgcaagtgttagtcctgatacaaaatttattttaaataatcttaagcttaatattgaatcttctattggtgattacatttattatgaaaaattagagcctgttaaaaatataattcacaattctatagatgatttaatagatgagttcaatctacttgaaaatgtatctgatgaattatatgaattaaaaaaattaaataatctagatgagaagtatttaatatcttttgaagatatctcaaaaaataattcaacttactctgtaagatttattaacaaaagtaatggtgagtcagtttatgtagaaacagaaaaagaaattttttcaaaatatagcgaacatattacaaaagaaataagtactataaagaatagtataattacagatgttaatggtaatttattggataatatacagttagatcatacttctcaagttaatacattaaacgcagcattctttattcaatcattaatagattatagtagcaataaagatgtactgaatgatttaagtacctcagttaaggttcaactttatgctcaactatttagtacaggtttaaatactatatatgactctatccaattagtaaatttaatatcaaatgcagtaaatgatactataaatgtactacctacaataacagaggggatacctattgtatctactatattagacggaataaacttaggtgcagcaattaaggaattactagacgaacatgacccattactaaaaaaagaattagaagctaaggtgggtgttttagcaataaatatgtcattatctatagctgcaactgtagcttcaattgttggaataggtgctgaagttactattttcttattacctatagctggtatatctgcaggaataccttcattagttaataatgaattaatattgcatgataaggcaacttcagtggtaaactattttaatcatttgtctgaatctaaaaaatatggccctcttaaaacagaagatgataaaattttagttcctattgatgatttagtaatatcagaaatagattttaataataattcgataaaactaggaacatgtaatatattagcaatggaggggggatcaggacacacagtgactggtaatatagatcactttttctcatctccatctataagttctcatattccttcattatcaatttattctgcaataggtatagaaacagaaaatctagatttttcaaaaaaaataatgatgttacctaatgctccttcaagagtgttttggtgggaaactggagcagttccaggtttaagatcattggaaaatgacggaactagattacttgattcaataagagatttatacccaggtaaattttactggagattctatgcttttttcgattatgcaataactacattaaaaccagtttatgaagacactaatattaaaattaaactagataaagatactagaaacttcataatgccaactataactactaacgaaattagaaacaaattatcttattcatttgatggagcaggaggaacttactctttattattatcttcatatccaatatcaacgaatataaatttatctaaagatgatttatggatatttaatattgataatgaagtaagagaaatatctatagaaaatggtactattaaaaaaggaaagttaataaaagatgttttaagtaaaattgatataaataaaaataaacttattataggcaatcaaacaatagatttttcaggcgatatagataataaagatagatatatattcttgacttgtgagttagatgataaaattagtttaataatagaaataaatcttgttgcaaaatcttatagtttgttattgtctggggataaaaattatttgatatccaatttatctaatattattgagaaaatcaatactttaggcctagatagtaaaaatatagcgtacaattacactgatgaatctaataataaatattttggagctatatctaaaacaagtcaaaaaagcataatacattataaaaaagacagtaaaaatatattagaattttataatgacagtacattagaatttaacagtaaagattttattgctgaagatataaatgtatttatgaaagatgatattaatactataacaggaaaatactatgttgataataatactgataaaagtatagatttctctatttctttagttagtaaaaatcaagtaaaagtaaatggattatatttaaatgaatccgtatactcatcttaccttgattttgtgaaaaattcagatggacaccataatacttctaattttatgaatttatttttggacaatataagtttctggaaattgtttgggtttgaaaatataaattttgtaatcgataaatactttacccttgttggtaaaactaatcttggatatgtagaatttatttgtgacaataataaaaatatagatatatattttggtgaatggaaaacatcgtcatctaaaagcactatatttagcggaaatggtagaaatgttgtagtagagcctatatataatcctgatacgggtgaagatatatctacttcactagatttttcctatgaacctctctatggaatagatagatatatcaataaagtattgatagcacctgatttatatacaagtttaataaatattaataccaattattattcaaatgagtactaccctgagattatagttcttaacccaaatacattccacaaaaaagtaaatataaatttagatagttcttcttttgagtataaatggtctacagaaggaagtgactttattttagttagatacttagaagaaagtaataaaaaaatattacaaaaaataagaatcaaaggtatcttatctaatactcaatcatttaataaaatgagtatagattttaaagatattaaaaaactatcattaggatatataatgagtaattttaaatcatttaattctgaaaatgaattagataga

SEQ ID NO: 36 - DNA, 798 bp, Clostridium difficile
gaagatataaatgtatttatgaaagatgatattaatactataacaggaaaatactatgttgataataatactgataaaagtatagatttctctatttctttagttagtaaaaatcaagtaaaagtaaatggattatatttaaatgaatccgtatactcatcttaccttgattttgtgaaaaattcagatggacaccataatacttctaattttatgaatttatttttggacaatataagtttctggaaattgtttgggtttgaaaatataaattttgtaatcgataaatactttacccttgttggtaaaactaatcttggatatgtagaatttatttgtgacaataataaaaatatagatatatattttggtgaatggaaaacatcgtcatctaaaagcactatatttagcggaaatggtagaaatgttgtagtagagcctatatataatcctgatacgggtgaagatatatctacttcactagatttttcctatgaacctctctatggaatagatagatatatcaataaagtattgatagcacctgatttatatacaagtttaataaatattaataccaattattattcaaatgagtactaccctgagattatagttcttaacccaaatacattccacaaaaaagtaaatataaatttagatagttcttcttttgagtataaatggtctacagaaggaagtgactttattttagttagatacttagaagaaagtaataaaaaaatattacaaaaaataagaatcaaaggtatcttatctaatactcaatcatttaat

SEQ ID NO: 37 - DNA, 2649 bp, Clostridium difficile
gatcatttaggatttaaaataatagataataaaacttattactatgatgaagatagtaaattagttaaaggattaatcaatataaataattcattattctattttgatcctatagaatttaacttagtaactggatggcaaactatcaatggtaaaaaatattattttgatataaatactggagcagctttaattagttataaaattattaatggtaaacacttttattttaataatgatggtgtgatgcagttgggagtatttaaaggacctgatggatttgaatattttgcacctgccaatactcaaaataataacatagaaggtcaggctatagtttatcaaagtaaattcttaactttgaatggcaaaaaatattattttgataatgactcaaaagcagtcactggatggagaattattaacaatgagaaatattactttaatcctaataatgctattgctgcagtcggattgcaagtaattgacaataataagtattatttcaatcctgacactgctatcatctcaaaaggttggcagactgttaatggtagtagatactactttgatactgataccgctattgcctttaatggttataaaactattgatggtaaacacttttattttgatagtgattgtgtagtgaaaataggtgtgtttagtacctctaatggatttgaatattttgcacctgctaatacttataataataacatagaaggtcaggctatagtttatcaaagtaaattcttaactttgaatggtaaaaaatattactttgataataactcaaaagcagttaccggatggcaaactattgatagtaaaaaatattactttaatactaacactgctgaagcagctactggatggcaaactattgatggtaaaaaatattactttaatactaacactgctgaagcagctactggatggcaaactattgatggtaaaaaatattactttaatactaacactgctatagcttcaactggttatacaattattaatggtaaacatttttattttaatactgatggtattatgcagataggagtgtttaaaggacctaatggatttgaatattttgcacctgctaatacggatgctaacaacatagaaggtcaagctatactttaccaaaatgaattcttaactttgaatggtaaaaaatattactttggtagtgactcaaaagcagttactggatggagaattattaacaataagaaatattactttaatcctaataatgctattgctgcaattcatctatgcactataaataatgacaagtattactttagttatgatggaattcttcaaaatggatatattactattgaaagaaataatttctattttgatgctaataatgaatctaaaatggtaacaggagtatttaaaggacctaatggatttgagtattttgcacctgctaatactcacaataataacatagaaggtcaggctatagtttaccagaacaaattcttaactttgaatggcaaaaaatattattttgataatgactcaaaagcagttactggatggcaaaccattgatggtaaaaaatattactttaatcttaacactgctgaagcagctactggatggcaaactattgatggtaaaaaatattactttaatcttaacactgctgaagcagctactggatggcaaactattgatggtaaaaaatattactttaatactaacactttcatagcctcaactggttatacaagtattaatggtaaacatttttattttaatactgatggtattatgcagataggagtgtttaaaggacctaatggatttgaatactttgcacctgctaatactcataataataacatagaaggtcaagctatactttaccaaaataaattcttaactttgaatggtaaaaaatattactttggtagtgactcaaaagcagttaccggattgcgaactattgatggtaaaaaatattactttaatactaacactgctgttgcagttactggatggcaaactattaatggtaaaaaatactactttaatactaacacttctatagcttcaactggttatacaattattagtggtaaacatttttattttaatactgatggtattatgcagataggagtgtttaaaggacctgatggatttgaatactttgcacctgctaatacagatgctaacaatatagaaggtcaagctatacgttatcaaaatagattcctatatttacatgacaatatatattattttggtaataattcaaaagcagctactggttgggtaactattgatggtaatagatattacttcgagcctaatacagctatgggtgcgaatggttataaaactattgataataaaaatttttactttagaaatggtttacctcagataggagtgtttaaagggtctaatcgttatcaaaatagattcctacatttacttggaaaaatatattactttggtaataattcaaaagcagttactggatggcaaactattaatggtaaagtatattactttatgcctgatactgctatggctgcagctggtggacttttcgagattgatggtgttatatatttctttggtgttgatggagtaaaagcccctgggatatatggctaa

SEQ ID NO: 38 - DNA, 612 bp, Clostridium difficile
agatactactttgatactgataccgctattgcctttaatggttataaaactattgatggtaaacacttttattttgatagtgattgtgtagtgaaaataggtgtgtttagtacctctaatggatttgaatattttgcacctgctaatacttataataataacatagaaggtcaggctatagtttatcaaagtaaattcttaactttgaatggtaaaaaatattactttgataataactcaaaagcagttaccggatggcaaactattgatagtaaaaaatattactttaatactaacactgctgaagcagctactggatggcaaactattgatggtaaaaaatattactttaatactaacactgctgaagcagctactggatggcaaactattgatggtaaaaaatattactttaatactaacactgctatagcttcaactggttatacaattattaatggtaaacatttttattttaatactgatggtattatgcagataggagtgtttaaaggacctaatggatttgaatattttgcacctgctaatacggatgctaacaacatagaaggtcaagctatactttaccaaaatgaattcttaactttgaat

SEQ ID NO: 39 - DNA, 1371 bp, Clostridium difficile
atcctgcagaacggctatatcaccatcgaacgtaataacttctacttcgatgccaataacgaatccaaaatggtgacgggcgtgtttaaaggcccaaatggttttgagtatttcgcgccggcaaacacccacaataacaacattgaaggtcaagccattgtttaccaaaacaaattcctgaccctaaatggaaaaaaatattactttgataacgacagcaaagcggtcaccggctggcagacaatcgacggtaaaaaatattactttaatcttaacaccgcagaagcggccaccggctggcaaaccatcgatggtaaaaaatattacttcaacttgaacaccgcagaagcggccaccggctggcagaccatcgatggtaaaaaatactactttaataccaacaccttcattgctagcaccggttatacttcgatcaacggtaaacatttttactttaataccgacggtatcatgcaaattggcgtattcaaaggtcctaacggctttgaatactttgcgccagcaaatacccacaacaataacattgaaggtcaggccattctgtaccaaaacaaattcctgaccctaaatggtaaaaaatattacttcggtagtgacagcaaagcggttacaggcctaaggaccatcgatggtaaaaaatattactttaacaccaacaccgcagtcgcggttaccggctggcagaccatcaatggtaaaaaatactactttaacaccaacacctctattgccagcaccggttacacgatcatctcgggtaaacatttctattttaataccgatggtatcatgcaaattggcgtatttaaaggtccggacggcttcgaatactttgcgcctgcaaacacggatgccaacaatattgagggtcaggcaattagatatcaaaaccgcttcctctacctgcatgacaatatttattactttggtaacaatagcaaagcggccaccggttgggtgaccatcgatggtaaccgttattacttcgagccaaatacggcaatgggtgctaacggttataaaaccatcgacaataaaaacttctactttcgcaatggtctgccgcaaattggcgtatttaaaggatctaacggcttcgaatactttgcgcctgccaatacagatgcaaacaacattgaaggtcaggccattagataccaaaatcgtttcctccatttacttggcaaaatttattactttggtaacaatagcaaagcggtcaccggttggcaaaccatcaacggtaaagtgtattactttatgccagataccgcaatggccgcggcaggtggcttgttcgagatcgacggtgttatttacttcttcggtgtcgatggcgtgaaagctccg

SEQ ID NO: 40 - DNA, 955 bp, Clostridium difficile
gcctcaactggttatacaagtattaatggtaaacatttttattttaatactgatggtattatgcagataggagtgtttaaaggacctaatggatttgaatactttgcacctgctaatactcataataataacatagaaggtcaagctatactttaccaaaataaattcttaactttgaatggtaaaaaatattactttggtagtgactcaaaagcagttaccggattgcgaactattgatggtaaaaaatattactttaatactaacactgctgttgcagttactggatggcaaactattaatggtaaaaaatactactttaatactaacacttctatagcttcaactggttatacaattattagtggtaaacatttttattttaatactgatggtattatgcagataggagtgtttaaaggacctgatggatttgaatactttgcacctgctaatacagatgctaacaatatagaaggtcaagctatacgttatcaaaatagattcctatatttacatgacaatatatattattttggtaataattcaaaagcagctactggttgggtaactattgatggtaatagatattacttcgagcctaatacagctatgggtgcgaatggttataaaactattgataataaaaatttttactttagaaatggtttacctcagataggagtgtttaaagggtctaatggatttgaatactttgcacctgctaatacggatgctaacaatatagaaggtcaagctatacgttatcaaaatagattcctacatttacttggaaaaatatattactttggtaataattcaaaagcagttactggatggcaaactattaatggtaaagtatattactttatgcctgatactgctatggctgcagctggtggacttttcgagattgatggtgttatatatttctttggtgttgatggagtaaaag

SEQ ID NO: 41 - DNA, 2592 bp, Clostridium difficile
tttgatcctatagaatttaacttagtaactggatggcaaactatcaatggtaaaaaatattattttgatataaatactggagcagctttaattagttataaaattattaatggtaaacacttttattttaataatgatggtgtgatgcagttgggagtatttaaaggacctgatggatttgaatattttgcacctgccaatactcaaaataataacatagaaggtcaggctatagtttatcaaagtaaattcttaactttgaatggcaaaaaatattattttgataatgactcaaaagcagtcactggatggagaattattaacaatgagaaatattactttaatcctaataatgctattgctgcagtcggattgcaagtaattgacaataataagtattatttcaatcctgacactgctatcatctcaaaaggttggcagactgttaatggtagtagatactactttgatactgataccgctattgcctttaatggttataaaactattgatggtaaacacttttattttgatagtgattgtgtagtgaaaataggtgtgtttagtacctctaatggatttgaatattttgcacctgctaatacttataataataacatagaaggtcaggctatagtttatcaaagtaaattcttaactttgaatggtaaaaaatattactttgataataactcaaaagcagttaccggatggcaaactattgatagtaaaaaatattactttaatactaacactgctgaagcagctactggatggcaaactattgatggtaaaaaatattactttaatactaacactgctgaagcagctactggatggcaaactattgatggtaaaaaatattactttaatactaacactgctatagcttcaactggttatacaattattaatggtaaacatttttattttaatactgatggtattatgcagataggagtgtttaaaggacctaatggatttgaatattttgcacctgctaatacggatgctaacaacatagaaggtcaagctatactttaccaaaatgaattcttaactttgaatggtaaaaaatattactttggtagtgactcaaaagcagttactggatggagaattattaacaataagaaatattactttaatcctaataatgctattgctgcaattcatctatgcactataaataatgacaagtattactttagttatgatggaattcttcaaaatggatatattactattgaaagaaataatttctattttgatgctaataatgaatctaaaatggtaacaggagtatttaaaggacctaatggatttgagtattttgcacctgctaatactcacaataataacatagaaggtcaggctatagtttaccagaacaaattcttaactttgaatggcaaaaaatattattttgataatgactcaaaagcagttactggatggcaaaccattgatggtaaaaaatattactttaatcttaacactgctgaagcagctactggatggcaaactattgatggtaaaaaatattactttaatcttaacactgctgaagcagctactggatggcaaactattgatggtaaaaaatattactttaatactaacactttcatagcctcaactggttatacaagtattaatggtaaacatttttattttaatactgatggtattatgcagataggagtgtttaaaggacctaatggatttgaatactttgcacctgctaatactcataataataacatagaaggtcaagctatactttaccaaaataaattcttaactttgaatggtaaaaaatattactttggtagtgactcaaaagcagttaccggattgcgaactattgatggtaaaaaatattactttaatactaacactgctgttgcagttactggatggcaaactattaatggtaaaaaatactactttaatactaacacttctatagcttcaactggttatacaattattagtggtaaacatttttattttaatactgatggtattatgcagataggagtgtttaaaggacctgatggatttgaatactttgcacctgctaatacagatgctaacaatatagaaggtcaagctatacgttatcaaaatagattcctatatttacatgacaatatatattattttggtaataattcaaaagcagctactggttgggtaactattgatggtaatagatattacttcgagcctaatacagctatgggtgcgaatggttataaaactattgataataaaaatttttactttagaaatggtttacctcagataggagtgtttaaagggtctaatggatttgaatactttgcacctgctaatacggatgctaacaatatagaaggtcaagctatacgttatcaaaatagattcctacatttacttggaaaaatatattactttggtaataattcaaaagcagttactggatggcaaactattaatggtaaagtatattactttatgcctgatactgctatggctgcagctggtggacttttcgagattgatggtgttatatatttctttggtgttgatggagtaaaagcccct

SEQ ID NO: 42 - DNA, 807 bp, Clostridium difficile
taccaaaataaattcttaactttgaatggtaaaaaatattactttggtagtgactcaaaagcagttaccggattgcgaactattgatggtaaaaaatattactttaatactaacactgctgttgcagttactggatggcaaactattaatggtaaaaaatactactttaatactaacacttctatagcttcaactggttatacaattattagtggtaaacatttttattttaatactgatggtattatgcagataggagtgtttaaaggacctgatggatttgaatactttgcacctgctaatacagatgctaacaatatagaaggtcaagctatacgttatcaaaatagattcctatatttacatgacaatatatattattttggtaataattcaaaagcagctactggttgggtaactattgatggtaatagatattacttcgagcctaatacagctatgggtgcgaatggttataaaactattgataataaaaatttttactttagaaatggtttacctcagataggagtgtttaaagggtctaatggatttgaatactttgcacctgctaatacggatgctaacaatatagaaggtcaagctatacgttatcaaaatagattcctacatttacttggaaaaatatattactttggtaataattcaaaagcagttactggatggcaaactattaatggtaaagtatattactttatgcctgatactgctatggctgcagctggtggacttttcgagattgatggtgttatatatttctttggtgttgatggagtaaaagcccct

SEQ ID NO: 43 - DNA, 2616 bp, Clostridium difficile
tcattattctattttgatcctatagaatttaacttagtaactggatggcaaactatcaatggtaaaaaatattattttgatataaatactggagcagctttaattagttataaaattattaatggtaaacacttttattttaataatgatggtgtgatgcagttgggagtatttaaaggacctgatggatttgaatattttgcacctgccaatactcaaaataataacatagaaggtcaggctatagtttatcaaagtaaattcttaactttgaatggcaaaaaatattattttgataatgactcaaaagcagtcactggatggagaattattaacaatgagaaatattactttaatcctaataatgctattgctgcagtcggattgcaagtaattgacaataataagtattatttcaatcctgacactgctatcatctcaaaaggttggcagactgttaatggtagtagatactactttgatactgataccgctattgcctttaatggttataaaactattgatggtaaacacttttattttgatagtgattgtgtagtgaaaataggtgtgtttagtacctctaatggatttgaatattttgcacctgctaatacttataataataacatagaaggtcaggctatagtttatcaaagtaaattcttaactttgaatggtaaaaaatattactttgataataactcaaaagcagttaccggatggcaaactattgatagtaaaaaatattactttaatactaacactgctgaagcagctactggatggcaaactattgatggtaaaaaatattactttaatactaacactgctgaagcagctactggatggcaaactattgatggtaaaaaatattactttaatactaacactgctatagcttcaactggttatacaattattaatggtaaacatttttattttaatactgatggtattatgcagataggagtgtttaaaggacctaatggatttgaatattttgcacctgctaatacggatgctaacaacatagaaggtcaagctatactttaccaaaatgaattcttaactttgaatggtaaaaaatattactttggtagtgactcaaaagcagttactggatggagaattattaacaataagaaatattactttaatcctaataatgctattgctgcaattcatctatgcactataaataatgacaagtattactttagttatgatggaattcttcaaaatggatatattactattgaaagaaataatttctattttgatgctaataatgaatctaaaatggtaacaggagtatttaaaggacctaatggatttgagtattttgcacctgctaatactcacaataataacatagaaggtcaggctatagtttaccagaacaaattcttaactttgaatggcaaaaaatattattttgataatgactcaaaagcagttactggatggcaaaccattgatggtaaaaaatattactttaatcttaacactgctgaagcagctactggatggcaaactattgatggtaaaaaatattactttaatcttaacactgctgaagcagctactggatggcaaactattgatggtaaaaaatattactttaatactaacactttcatagcctcaactggttatacaagtattaatggtaaacatttttattttaatactgatggtattatgcagataggagtgtttaaaggacctaatggatttgaatactttgcacctgctaatactcataataataacatagaaggtcaagctatactttaccaaaataaattcttaactttgaatggtaaaaaatattactttggtagtgactcaaaagcagttaccggattgcgaactattgatggtaaaaaatattactttaatactaacactgctgttgcagttactggatggcaaactattaatggtaaaaaatactactttaatactaacacttctatagcttcaactggttatacaattattagtggtaaacatttttattttaatactgatggtattatgcagataggagtgtttaaaggacctgatggatttgaatactttgcacctgctaatacagatgctaacaatatagaaggtcaagctatacgttatcaaaatagattcctatatttacatgacaatatatattattttggtaataattcaaaagcagctactggttgggtaactattgatggtaatagatattacttcgagcctaatacagctatgggtgcgaatggttataaaactattgataataaaaatttttactttagaaatggtttacctcagataggagtgtttaaagggtctaatggatttgaatactttgcacctgctaatacggatgctaacaatatagaaggtcaagctatacgttatcaaaatagattcctacatttacttggaaaaatatattactttggtaataattcaaaagcagttactggatggcaaactattaatggtaaagtatattactttatgcctgatactgctatggctgcagctggtggacttttcgagattgatggtgttatatatttctttggtgttgatggagtaaaagcccctgggatatatggc

SEQ ID NO: 44 - DNA, 2229 bp, Clostridium difficile
gcagtcggattgcaagtaattgacaataataagtattatttcaatcctgacactgctatcatctcaaaaggttggcagactgttaatggtagtagatactactttgatactgataccgctattgcctttaatggttataaaactattgatggtaaacacttttattttgatagtgattgtgtagtgaaaataggtgtgtttagtacctctaatggatttgaatattttgcacctgctaatacttataataataacatagaaggtcaggctatagtttatcaaagtaaattcttaactttgaatggtaaaaaatattactttgataataactcaaaagcagttaccggatggcaaactattgatagtaaaaaatattactttaatactaacactgctgaagcagctactggatggcaaactattgatggtaaaaaatattactttaatactaacactgctgaagcagctactggatggcaaactattgatggtaaaaaatattactttaatactaacactgctatagcttcaactggttatacaattattaatggtaaacatttttattttaatactgatggtattatgcagataggagtgtttaaaggacctaatggatttgaatattttgcacctgctaatacggatgctaacaacatagaaggtcaagctatactttaccaaaatgaattcttaactttgaatggtaaaaaatattactttggtagtgactcaaaagcagttactggatggagaattattaacaataagaaatattactttaatcctaataatgctattgctgcaattcatctatgcactataaataatgacaagtattactttagttatgatggaattcttcaaaatggatatattactattgaaagaaataatttctattttgatgctaataatgaatctaaaatggtaacaggagtatttaaaggacctaatggatttgagtattttgcacctgctaatactcacaataataacatagaaggtcaggctatagtttaccagaacaaattcttaactttgaatggcaaaaaatattattttgataatgactcaaaagcagttactggatggcaaaccattgatggtaaaaaatattactttaatcttaacactgctgaagcagctactggatggcaaactattgatggtaaaaaatattactttaatcttaacactgctgaagcagctactggatggcaaactattgatggtaaaaaatattactttaatactaacactttcatagcctcaactggttatacaagtattaatggtaaacatttttattttaatactgatggtattatgcagataggagtgtttaaaggacctaatggatttgaatactttgcacctgctaatactcataataataacatagaaggtcaagctatactttaccaaaataaattcttaactttgaatggtaaaaaatattactttggtagtgactcaaaagcagttaccggattgcgaactattgatggtaaaaaatattactttaatactaacactgctgttgcagttactggatggcaaactattaatggtaaaaaatactactttaatactaacacttctatagcttcaactggttatacaattattagtggtaaacatttttattttaatactgatggtattatgcagataggagtgtttaaaggacctgatggatttgaatactttgcacctgctaatacagatgctaacaatatagaaggtcaagctatacgttatcaaaatagattcctatatttacatgacaatatatattattttggtaataattcaaaagcagctactggttgggtaactattgatggtaatagatattacttcgagcctaatacagctatgggtgcgaatggttataaaactattgataataaaaatttttactttagaaatggtttacctcagataggagtgtttaaagggtctaatggatttgaatactttgcacctgctaatacggatgctaacaatatagaaggtcaagctatacgttatcaaaatagattcctacatttacttggaaaaatatattactttggtaataattcaaaagcagttactggatggcaaactattaatggtaaagtatattactttatgcctgatactgctatggctgcagctggtggacttttcgagattgatggtgttatatatttctttggtgttgatggagtaaaagcccct

SEQ ID NO: 45 - DNA, 2448 bp, Clostridium difficile
atgcagttgggagtatttaaaggacctgatggatttgaatattttgcacctgccaatactcaaaataataacatagaaggtcaggctatagtttatcaaagtaaattcttaactttgaatggcaaaaaatattattttgataatgactcaaaagcagtcactggatggagaattattaacaatgagaaatattactttaatcctaataatgctattgctgcagtcggattgcaagtaattgacaataataagtattatttcaatcctgacactgctatcatctcaaaaggttggcagactgttaatggtagtagatactactttgatactgataccgctattgcctttaatggttataaaactattgatggtaaacacttttattttgatagtgattgtgtagtgaaaataggtgtgtttagtacctctaatggatttgaatattttgcacctgctaatacttataataataacatagaaggtcaggctatagtttatcaaagtaaattcttaactttgaatggtaaaaaatattactttgataataactcaaaagcagttaccggatggcaaactattgatagtaaaaaatattactttaatactaacactgctgaagcagctactggatggcaaactattgatggtaaaaaatattactttaatactaacactgctgaagcagctactggatggcaaactattgatggtaaaaaatattactttaatactaacactgctatagcttcaactggttatacaattattaatggtaaacatttttattttaatactgatggtattatgcagataggagtgtttaaaggacctaatggatttgaatattttgcacctgctaatacggatgctaacaacatagaaggtcaagctatactttaccaaaatgaattcttaactttgaatggtaaaaaatattactttggtagtgactcaaaagcagttactggatggagaattattaacaataagaaatattactttaatcctaataatgctattgctgcaattcatctatgcactataaataatgacaagtattactttagttatgatggaattcttcaaaatggatatattactattgaaagaaataatttctattttgatgctaataatgaatctaaaatggtaacaggagtatttaaaggacctaatggatttgagtattttgcacctgctaatactcacaataataacatagaaggtcaggctatagtttaccagaacaaattcttaactttgaatggcaaaaaatattattttgataatgactcaaaagcagttactggatggcaaaccattgatggtaaaaaatattactttaatcttaacactgctgaagcagctactggatggcaaactattgatggtaaaaaatattactttaatcttaacactgctgaagcagctactggatggcaaactattgatggtaaaaaatattactttaatactaacactttcatagcctcaactggttatacaagtattaatggtaaacatttttattttaatactgatggtattatgcagataggagtgtttaaaggacctaatggatttgaatactttgcacctgctaatactcataataataacatagaaggtcaagctatactttaccaaaataaattcttaactttgaatggtaaaaaatattactttggtagtgactcaaaagcagttaccggattgcgaactattgatggtaaaaaatattactttaatactaacactgctgttgcagttactggatggcaaactattaatggtaaaaaatactactttaatactaacacttctatagcttcaactggttatacaattattagtggtaaacatttttattttaatactgatggtattatgcagataggagtgtttaaaggacctgatggatttgaatactttgcacctgctaatacagatgctaacaatatagaaggtcaagctatacgttatcaaaatagattcctatatttacatgacaatatatattattttggtaataattcaaaagcagctactggttgggtaactattgatggtaatagatattacttcgagcctaatacagctatgggtgcgaatggttataaaactattgataataaaaatttttactttagaaatggtttacctcagataggagtgtttaaagggtctaatggatttgaatactttgcacctgctaatacggatgctaacaatatagaaggtcaagctatacgttatcaaaatagattcctacatttacttggaaaaatatattactttggtaataattcaaaagcagttactggatggcaaactattaatggtaaagtatattactttatgcctgatactgctatggctgcagctggtggacttttcgagattgatggtgttatatatttctttggtgttgatggagtaaaagcccct

SEQ ID NO: 46 - DNA, 2301 bp, Clostridium difficile
atgagtttagttaatagaaaacagttagaaaaaatggcaaatgtaagatttcgtactcaagaagatgaatatgttgcaatattggatgctttagaagaatatcataatatgtcagagaatactgtagtcgaaaaatatttaaaattaaaagatataaatagtttaacagatatttatatagatacatataaaaaatctggtagaaataaagccttaaaaaaatttaaggaatatctagttacagaagtattagagctaaagaataataatttaactccagttgagaaaaatttacattttgtttggattggaggtcaaataaatgacactgctattaattatataaatcaatggaaagatgtaaatagtgattataatgttaatgttttttatgatagtaatgcatttttgataaacacattgaaaaaaactgtagtagaatcagcaataaatgatacacttgaatcatttagagaaaacttaaatgaccctagatttgactataataaattcttcagaaaacgtatggaaataatttatgataaacagaaaaatttcataaactactataaagctcaaagagaagaaaatcctgaacttataattgatgatattgtaaagacatatctttcaaatgagtattcaaaggagatagatgaacttaatacctatattgaagaatccttaaataaaattacacagaatagtggaaatgatgttagaaactttgaagaatttaaaaatggagagtcattcaacttatatgaacaagagttggtagaaaggtggaatttagctgctgcttctgacatattaagaatatctgcattaaaagaaattggtggtatgtatttagatgttgatatgttaccaggaatacaaccagacttatttgagtctatagagaaacctagttcagtaacagtggatttttgggaaatgacaaagttagaagctataatgaaatacaaagaatatataccagaatatacctcagaacattttgacatgttagacgaagaagttcaaagtagttttgaatctgttctagcttctaagtcagataaatcagaaatattctcatcacttggtgatatggaggcatcaccactagaagttaaaattgcatttaatagtaagggtattataaatcaagggctaatttctgtgaaagactcatattgtagcaatttaatagtaaaacaaatcgagaatagatataaaatattgaataatagtttaaatccagctattagcgaggataatgattttaatactacaacgaatacctttattgatagtataatggctgaagctaatgcagataatggtagatttatgatggaactaggaaagtatttaagagttggtttcttcccagatgttaaaactactattaacttaagtggccctgaagcatatgcggcagcttatcaagatttattaatgtttaaagaaggcagtatgaatatccatttgatagaagctgatttaagaaactttgaaatctctaaaactaatatttctcaatcaactgaacaagaaatggctagcttatggtcatttgacgatgcaagagctaaagctcaatttgaagaatataaaaggaattattttgaaggttctcttggtgaagatgataatcttgatttttctcaaaatatagtagttgacaaggagtatcttttagaaaaaatatcttcattagcaagaagttcagagagaggatatatacactatattgttcagttacaaggagataaaattagttatgaagcagcatgtaacttatttgcaaagactccttatgatagtgtactgtttcagaaaaatatagaagattcagaaattgcatattattataatcctggagatggtgaaatacaagaaatagacaagtataaaattccaagtataatttctgatagacctaagattaaattaacatttattggtcatggtaaagatgaatttaatactgatatatttgcaggttttgatgtagattcattatccacagaaatagaagcagcaatagatttagctaaagaggatatttctcctaagtcaatagaaataaatttattaggatgtaatatgtttagctactctatcaacgtagaggagacttatcctggaaaattattacttaaagttaaagataaaatatcagaattaatgccatctataagtcaagactctattatagtaagtgcaaatcaatatgaagttagaataaatagtgaaggaagaagagaattattggatcattctggtgaatggataaataaagaagaaagt

SEQ ID NO: 47 - DNA, 1629 bp, Clostridium difficile
atgagtttagttaatagaaaacagttagaaaaaatggcaaatgtaagatttcgtactcaagaagatgaatatgttgcaatattggatgctttagaagaatatcataatatgtcagagaatactgtagtcgaaaaatatttaaaattaaaagatataaatagtttaacagatatttatatagatacatataaaaaatctggtagaaataaagccttaaaaaaatttaaggaatatctagttacagaagtattagagctaaagaataataatttaactccagttgagaaaaatttacattttgtttggattggaggtcaaataaatgacactgctattaattatataaatcaatggaaagatgtaaatagtgattataatgttaatgttttttatgatagtaatgcatttttgataaacacattgaaaaaaactgtagtagaatcagcaataaatgatacacttgaatcatttagagaaaacttaaatgaccctagatttgactataataaattcttcagaaaacgtatggaaataatttatgataaacagaaaaatttcataaactactataaagctcaaagagaagaaaatcctgaacttataattgatgatattgtaaagacatatctttcaaatgagtattcaaaggagatagatgaacttaatacctatattgaagaatccttaaataaaattacacagaatagtggaaatgatgttagaaactttgaagaatttaaaaatggagagtcattcaacttatatgaacaagagttggtagaaaggtggaatttagctgctgcttctgacatattaagaatatctgcattaaaagaaattggtggtatgtatttagatgttgatatgttaccaggaatacaaccagacttatttgagtctatagagaaacctagttcagtaacagtggatttttgggaaatgacaaagttagaagctataatgaaatacaaagaatatataccagaatatacctcagaacattttgacatgttagacgaagaagttcaaagtagttttgaatctgttctagcttctaagtcagataaatcagaaatattctcatcacttggtgatatggaggcatcaccactagaagttaaaattgcatttaatagtaagggtattataaatcaagggctaatttctgtgaaagactcatattgtagcaatttaatagtaaaacaaatcgagaatagatataaaatattgaataatagtttaaatccagctattagcgaggataatgattttaatactacaacgaatacctttattgatagtataatggctgaagctaatgcagataatggtagatttatgatggaactaggaaagtatttaagagttggtttcttcccagatgttaaaactactattaacttaagtggccctgaagcatatgcggcagcttatcaagatttattaatgtttaaagaaggcagtatgaatatccatttgatagaagctgatttaagaaactttgaaatctctaaaactaatatttctcaatcaactgaacaagaaatggctagcttatggtcatttgacgatgcaagagctaaagctcaatttgaagaatataaaaggaattattttgaaggttctctt

SEQ ID NO: 48 - DNA, 672 bp, Clostridium difficile
ggtgaagatgataatcttgatttttctcaaaatatagtagttgacaaggagtatcttttagaaaaaatatcttcattagcaagaagttcagagagaggatatatacactatattgttcagttacaaggagataaaattagttatgaagcagcatgtaacttatttgcaaagactccttatgatagtgtactgtttcagaaaaatatagaagattcagaaattgcatattattataatcctggagatggtgaaatacaagaaatagacaagtataaaattccaagtataatttctgatagacctaagattaaattaacatttattggtcatggtaaagatgaatttaatactgatatatttgcaggttttgatgtagattcattatccacagaaatagaagcagcaatagatttagctaaagaggatatttctcctaagtcaatagaaataaatttattaggatgtaatatgtttagctactctatcaacgtagaggagacttatcctggaaaattattacttaaagttaaagataaaatatcagaattaatgccatctataagtcaagactctattatagtaagtgcaaatcaatatgaagttagaataaatagtgaaggaagaagagaattattggatcattctggtgaatggataaataaagaagaaagt

SEQ ID NO: 49 - DNA, 3198 bp, Clostridium difficile
attataaaggatatttcatcaaaagaatatatatcatttaatcctaaagaaaataaaattacagtaaaatctaaaaatttacctgagctatctacattattacaagaaattagaaataattctaattcaagtgatattgaactagaagaaaaagtaatgttaacagaatgtgagataaatgttatttcaaatatagatacgcaaattgttgaggaaaggattgaagaagctaagaatttaacttctgactctattaattatataaaagatgaatttaaactaatagaatctatttctgatgcactatgtgacttaaaacaacagaatgaattagaagattctcattttatatcttttgaggacatatcagagactgatgagggatttagtataagatttattaataaagaaactggagaatctatatttgtagaaactgaaaaaacaatattctctgaatatgctaatcatataactgaagagatttctaagataaaaggtactatatttgatactgtaaatggtaagttagtaaaaaaagtaaatttagatactacacacgaagtaaatactttaaatgctgcattttttatacaatcattaatagaatataatagttctaaagaatctcttagtaatttaagtgtagcaatgaaagtccaagtttacgctcaattatttagtactggtttaaatactattacagatgcagccaaagttgttgaattagtatcaactgcattagatgaaactatagacttacttcctacattatctgaaggattacctataattgcaactattatagatggtgtaagtttaggtgcagcaatcaaagagctaagtgaaacgagtgacccattattaagacaagaaatagaagctaagataggtataatggcagtaaatttaacaacagctacaactgcaatcattacttcatctttggggatagctagtggatttagtatacttttagttcctttagcaggaatttcagcaggtataccaagcttagtaaacaatgaacttgtacttcgagataaggcaacaaaggttgtagattattttaaacatgtttcattagttgaaactgaaggagtatttactttattagatgataaaataatgatgccacaagatgatttagtgatatcagaaatagattttaataataattcaatagttttaggtaaatgtgaaatctggagaatggaaggtggttcaggtcatactgtaactgatgatatagatcacttcttttcagcaccatcaataacatatagagagccacacttatctatatatgacgtattggaagtacaaaaagaagaacttgatttgtcaaaagatttaatggtattacctaatgctccaaatagagtatttgcttgggaaacaggatggacaccaggtttaagaagcttagaaaatgatggcacaaaactgttagaccgtataagagataactatgaaggtgagttttattggagatattttgcttttatagctgatgctttaataacaacattaaaaccaagatatgaagatactaatataagaataaatttagatagtaatactagaagttttatagttccaataataactacagaatatataagagaaaaattatcatattctttctatggttcaggaggaacttatgcattgtctctttctcaatataatatgggtataaatatagaattaagtgaaagtgatgtttggattatagatgttgataatgttgtgagagatgtaactatagaatctgataaaattaaaaaaggtgatttaatagaaggtattttatctacactaagtattgaagagaataaaattatcttaaatagccatgagattaatttttctggtgaggtaaatggaagtaatggatttgtttctttaacattttcaattttagaaggaataaatgcaattatagaagttgatttattatctaaatcatataaattacttatttctggcgaattaaaaatattgatgttaaattcaaatcatattcaacagaaaatagattatataggattcaatagcgaattacagaaaaatataccatatagctttgtagatagtgaaggaaaagagaatggttttattaatggttcaacaaaagaaggtttatttgtatctgaattacctgatgtagttcttataagtaaggtttatatggatgatagtaagccttcatttggatattatagtaataatttgaaagatgtcaaagttataactaaagataatgttaatatattaacaggttattatcttaaggatgatataaaaatctctctttctttgactctacaagatgaaaaaactataaagttaaatagtgtgcatttagatgaaagtggagtagctgagattttgaagttcatgaatagaaaaggtaatacaaatacttcagattctttaatgagctttttagaaagtatgaatataaaaagtattttcgttaatttcttacaatctaatattaagtttatattagatgctaattttataataagtggtactacttctattggccaatttgagtttatttgtgatgaaaatgataatatacaaccatatttcattaagtttaatacactagaaactaattatactttatatgtaggaaatagacaaaatatgatagtggaaccaaattatgatttagatgattctggagatatatcttcaactgttatcaatttctctcaaaagtatctttatggaatagacagttgtgttaataaagttgtaatttcaccaaatatttatacagatgaaataaatataacgcctgtatatgaaacaaataatacttatccagaagttattgtattagatgcaaattatataaatgaaaaaataaatgttaatatcaatgatctatctatacgatatgtatggagtaatgatggtaatgattttattcttatgtcaactagtgaagaaaataaggtgtcacaagttaaaataagattcgttaatgtttttaaagataagactttggcaaataagctatcttttaactttagtgataaacaagatgtacctgtaagtgaaataatcttatcatttacaccttcatattatgaggatggattgattggctatgatttgggtctagtttctttatataatgagaaattttatattaataactttggaatgatggtatct

SEQ ID NO: 50 - DNA, 1545 bp, Clostridium difficile
ataactggatttgtgactgtaggcgatgataaatactactttaatccaattaatggtggagctgcttcaattggagagacaataattgatgacaaaaattattatttcaaccaaagtggagtgttacaaacaggtgtatttagtacagaagatggatttaaatattttgccccagctaatacacttgatgaaaacctagaaggagaagcaattgattttactggaaaattaattattgacgaaaatatttattattttgatgataattatagaggagctgtagaatggaaagaattagatggtgaaatgcactattttagcccagaaacaggtaaagcttttaaaggtctaaatcaaataggtgattataaatactatttcaattctgatggagttatgcaaaaaggatttgttagtataaatgataataaacactattttgatgattctggtgttatgaaagtaggttacactgaaatagatggcaagcatttctactttgctgaaaacggagaaatgcaaataggagtatttaatacagaagatggatttaaatattttgctcatcataatgaagatttaggaaatgaagaaggtgaagaaatctcatattctggtatattaaatttcaataataaaatttactattttgatgattcatttacagctgtagttggatggaaagatttagaggatggttcaaagtattattttgatgaagatacagcagaagcatatataggtttgtcattaataaatgatggtcaatattattttaatgatgatggaattatgcaagttggatttgtcactataaatgataaagtcttctacttctctgactctggaattatagaatctggagtacaaaacatagatgacaattatttctatatagatgataatggtatagttcaaattggtgtatttgatacttcagatggatataaatattttgcacctgctaatactgtaaatgataatatttacggacaagcagttgaatatagtggtttagttagagttggtgaagatgtatattattttggagaaacatatacaattgagactggatggatatatgatatggaaaatgaaagtgataaatattatttcaatccagaaactaaaaaagcatgcaaaggtattaatttaattgatgatataaaatattattttgatgagaagggcataatgagaacgggtcttatatcatttgaaaataataattattactttaatgagaatggtgaaatgcaatttggttatataaatatagaagataagatgttctattttggtgaagatggtgtcatgcagattggagtatttaatacaccagatggatttaaatactttgcacatcaaaatactttggatgagaattttgagggagaatcaataaactatactggttggttagatttagatgaaaagagatattattttacagatgaatatattgcagcaactggttcagttattattgatggtgaggagtattattttgatcctgatacagctcaattagtgattagtgaatag

SEQ ID NO: 51 - DNA, 633 bp, Clostridium difficile
gttcaaattggtgtatttgatacttcagatggatataaatattttgcacctgctaatactgtaaatgataatatttacggacaagcagttgaatatagtggtttagttagagttggtgaagatgtatattattttggagaaacatatacaattgagactggatggatatatgatatggaaaatgaaagtgataaatattatttcaatccagaaactaaaaaagcatgcaaaggtattaatttaattgatgatataaaatattattttgatgagaagggcataatgagaacgggtcttatatcatttgaaaataataattattactttaatgagaatggtgaaatgcaatttggttatataaatatagaagataagatgttctattttggtgaagatggtgtcatgcagattggagtatttaatacaccagatggatttaaatactttgcacatcaaaatactttggatgagaattttgagggagaatcaataaactatactggttggttagatttagatgaaaagagatattattttacagatgaatatattgcagcaactggttcagttattattgatggtgaggagtattattttgatcctgatacagctcaattagtgattagtgaatag

SEQ ID NO: 52 - DNA, 933 bp, Clostridium difficile
tattctggtatattaaatttcaataataaaatttactattttgatgattcatttacagctgtagttggatggaaagatttagaggatggttcaaagtattattttgatgaagatacagcagaagcatatataggtttgtcattaataaatgatggtcaatattattttaatgatgatggaattatgcaagttggatttgtcactataaatgataaagtcttctacttctctgactctggaattatagaatctggagtacaaaacatagatgacaattatttctatatagatgataatggtatagttcaaattggtgtatttgatacttcagatggatataaatattttgcacctgctaatactgtaaatgataatatttacggacaagcagttgaatatagtggtttagttagagttggtgaagatgtatattattttggagaaacatatacaattgagactggatggatatatgatatggaaaatgaaagtgataaatattatttcaatccagaaactaaaaaagcatgcaaaggtattaatttaattgatgatataaaatattattttgatgagaagggcataatgagaacgggtcttatatcatttgaaaataataattattactttaatgagaatggtgaaatgcaatttggttatataaatatagaagataagatgttctattttggtgaagatggtgtcatgcagattggagtatttaatacaccagatggatttaaatactttgcacatcaaaatactttggatgagaattttgagggagaatcaataaactatactggttggttagatttagatgaaaagagatattattttacagatgaatatattgcagcaactggttcagttattattgatggtgaggagtattattttgatcctgatacagctcaattagtgattagtgaa

SEQ ID NO: 53 - DNA, 2616 bp, Artificial Sequence
  B4 hybrid
catatgagtctggttaaccgtaaacaactggaaaaaatggcgaatgtgcgctttagaacccaggaagatgaatatgttgcgattctagatgcactggaagaataccataacatgtcagagaataccgtggtagaaaaatatctgaaactgaaagatattaactctctgacggatatctatattgacacgtacaaaaaaagcggtcgtaataaagctctgaaaaaatttaaggaatatctcgttacggaagtgctggagctcaagaacaataacctgaccccggttgagaaaaatctgcatttcgtttggatcggcggtcagattaacgacaccgccatcaattacattaaccagtggaaagatgtgaatagcgattataacgttaatgtcttttatgactcgaacgcgtttctaattaacacgctaaaaaaaaccgtggtggaaagcgcgattaatgatactcttgagagctttcgcgaaaacctgaacgacccacgtttcgactacaataaattcttccgcaaaagaatggaaattatctatgataaacaaaaaaacttcattaactactataaagcacaacgtgaagaaaatccggaactgattatcgacgatatcgtgaagacgtacttgagcaacgagtatagcaaggagattgatgaacttaatacatacatcgaagaatcactgaacaaaatcacgcaaaatagtggcaacgacgttcgcaactttgaggaatttaaaaatggcgagagcttcaacttatatgaacaggagctagtggaacgatggaacctggccgcagcctccgcgattctggcgatttctgcgctgaaagaaatcggtggtatggcgctggcggtcgcgatgctgccgggcattcagccggacctgtttgagtccattgagaaacctagtagcgtgacggtagacttctgggaaatgacgaagttagaagcaattatgaaatacaaagaatatattccggaatacacaagcgaacactttgacatgctggacgaggaagttcagtcgagctttgaatctgtcctcgccagcaagagcgataaaagcgaaattttcagcagcctgggtgatatggaggcgagcccgctcgaagttaaaatcgcgtttaattcgaagggtatcattaaccaaggactcatctccgtaaaagacagctattgttcaaatctgattgtgaaacagatagagaaccgctataaaattctaaataacagtctgaatccggcaatctcagaggacaacgatttcaataccactacaaacacatttatcgatagtattatggccgaagcaaatgcggacaacggtcgttttatgatggaactcggtaagtacctgcgcgtcggtttcttcccggatgttaaaaccaccatcaacttatcgggaccagaagcgtatgctgcggcctaccaggatctgctgatgtttaaagaaggaagcatgaatatacatctaattgaagcagacctgcgtaacttcgagatatctaaaaccaacatctcccaaagcaccgaacaggaaatggcctcactgtggagctttgacgatgcgcgcgcaaaagcccagtttgaagaatataaacgaaattactttgaaggtagcttgggatccggagggggtggtgctagcaccggttatacttcgatcaacggtaaacatttttactttaataccgacggtatcatgcaaattggcgtattcaaaggtcctaacggctttgaatactttgcgccagcaaatacccacaacaataacattgaaggtcaggccattctgtaccaaaacaaattcctgaccctaaatggtaaaaaatattacttcggtagtgacagcaaagcggttacaggcctaaggaccatcgatggtaaaaaatattactttaacaccaacaccgcagtcgcggttaccggctggcagaccatcaatggtaaaaaatactactttaacaccaacacctctattgccagcaccggttacacgatcatctcgggtaaacatttctattttaataccgatggtatcatgcaaattggcgtatttaaaggtccggacggcttcgaatactttgcgcctgcaaacacggatgccaacaatattgagggtcaggcaattagatatcaaaaccgcttcctctacctgcatgacaatatttattactttggtaacaatagcaaagcggccaccggttgggtgaccatcgatggtaaccgttattacttcgagccaaatacggcaatgggtgctaacggttataaaaccatcgacaataaaaacttctactttcgcaatggtctgccgcaaattggcgtatttaaaggatctaacggcttcgaatactttgcgcctgccaatacagatgcaaacaacattgaaggtcaggccattagataccaaaatcgtttcctccatttacttggcaaaatttattactttggtaacaatagcaaagcggtcaccggttggcaaaccatcaacggtaaagtgtattactttatgccagataccgcaatggccgcggcaggtggcttgttcgagatcgacggtgttatttacttcttcggtgtcgatggcgtgaaagctccgctcgag

SEQ ID NO: 54 - protein, 769 aa, Artificial Sequence
  Mutated sequence
MSLISKEELIKLAYSIRPRENEYKTILTNLDEYNKLTTNNNENKYLQLKKLNESIDVFMNKYKTSSRNRALSNLKKDILKEVILIKNSNTSPVEKNLHFVWIGGEVSDIALEYIKQWADINAEYNIKLWYDSEAFLVNTLKKAIVESSTTEALQLLEEEIQNPQFDNMKFYKKRMEFIYDRQKRFINYYKSQINKPTVPTIDDIIKSHLVSEYNRDETVLESYRTNSLRKINSNHGIDIRANSLFTEQELLNIYSQELLNRGNLAAASDIVRLLALKNFGGVALAVAMLPGIHSDLFKTISRPSSIGLDRWEMIKLEAIMKYKKYINNYTSENFDKLDQQLKDNFKLIIESKSEKSEIFSKLENLNVSDLEIKIAFALGSVINQALISKQGSYLTNLVIEQVKNRYQFLNQHLNPAIESDNNFTDTTKIFHDSLFNSATAENSMFLTKIAPYLQVGFMPEARSTISLSGPGAYASAYYDFINLQENTIEKTLKASDLIEFKFPENNLSQLTEQEINSLWSFDQASAKYQFEKYVRDYTGGSLSEDNGVDFNKNTALDKNYLLNNKIPSNNVEEAGSKNYVHYIIQLQGDDISYEATCNLFSKNPKNSIIIQRNMNESAKSYFLSDDGESILELNKYRIPERLKNKEKVKVTFIGHGKDEFNTSEFARLSVDSLSNEISSFLDTIKLDISPKNVEVNLLGCNMFSYDFNVEETYPGKLLLSIMDKITSTLPDVNKNSITIGANQYEVRINSEGRKELLAHSGKWINKEEA

SEQ ID NO: 55 - DNA, 2307 bp, Artificial Sequence
  Mutated sequence
atgtctttaatatctaaagaagagttaataaaactcgcatatagcattagaccaagagaaaatgagtataaaactatactaactaatttagacgaatataataagttaactacaaacaataatgaaaataaatatttacaattaaaaaaactaaatgaatcaattgatgtttttatgaataaatataaaacttcaagcagaaatagagcactctctaatctaaaaaaagatatattaaaagaagtaattcttattaaaaattccaatacaagccctgtagaaaaaaatttacattttgtatggataggtggagaagtcagtgatattgctcttgaatacataaaacaatgggctgatattaatgcagaatataatattaaactgtggtatgatagtgaagcattcttagtaaatacactaaaaaaggctatagttgaatcttctaccactgaagcattacagctactagaggaagagattcaaaatcctcaatttgataatatgaaattttacaaaaaaaggatggaatttatatatgatagacaaaaaaggtttataaattattataaatctcaaatcaataaacctacagtacctacaatagatgatattataaagtctcatctagtatctgaatataatagagatgaaactgtattagaatcatatagaacaaattctttgagaaaaataaatagtaatcatgggatagatatcagggctaatagtttgtttacagaacaagagttattaaatatttatagtcaggagttgttaaatcgtggaaatttagctgcagcatctgacatagtaagattattagccctaaaaaattttggcggagtagccttagccgttgccatgcttccaggtattcactctgatttatttaaaacaatatctagacctagctctattggactagaccgttgggaaatgataaaattagaggctattatgaagtataaaaaatatataaataattatacatcagaaaactttgataaacttgatcaacaattaaaagataattttaaactcattatagaaagtaaaagtgaaaaatctgagatattttctaaattagaaaatttaaatgtatctgatcttgaaattaaaatagctttcgctttaggcagtgttataaatcaagccttgatatcaaaacaaggttcatatcttactaacctagtaatagaacaagtaaaaaatagatatcaatttttaaaccaacaccttaacccagccatagagtctgataataacttcacagatactactaaaatttttcatgattcattatttaattcagctaccgcagaaaactctatgtttttaacaaaaatagcaccatacttacaagtaggttttatgccagaagctcgctccacaataagtttaagtggtccaggagcttatgcgtcagcttactatgatttcataaatttacaagaaaatactatagaaaaaactttaaaagcatcagatttaatagaatttaaattcccagaaaataatctatctcaattgacagaacaagaaataaatagtctatggagctttgatcaagcaagtgcaaaatatcaatttgagaaatatgtaagagattatactggtggatctctttctgaagacaatggggtagactttaataaaaatactgccctcgacaaaaactatttattaaataataaaattccatcaaacaatgtagaagaagctggaagtaaaaattatgttcattatatcatacagttacaaggagatgatataagttatgaagcaacatgcaatttattttctaaaaatcctaaaaatagtattattatacaacgaaatatgaatgaaagtgcaaaaagctactttttaagtgatgatggagaatctattttagaattaaataaatataggatacctgaaagattaaaaaataaggaaaaagtaaaagtaacctttattggacatggtaaagatgaattcaacacaagcgaatttgctagattaagtgtagattcactttccaatgagataagttcatttttagataccataaaattagatatatcacctaaaaatgtagaagtaaacttacttggatgtaatatgtttagttatgattttaatgttgaagaaacttatcctgggaagttgctattaagtattatggacaaaattacttccactttacctgatgtaaataaaaattctattactataggagcaaatcaatatgaagtaagaattaatagtgagggaagaaaagaacttctggctcactcaggtaaatggataaataaagaagaagct

SEQ ID NO: 56 - protein, 541 aa, Artificial Sequence
  Mutated sequence
MSLISKEELIKLAYSIRPRENEYKTILTNLDEYNKLTTNNNENKYLQLKKLNESIDVFMNKYKTSSRNRALSNLKKDILKEVILIKNSNTSPVEKNLHFVWIGGEVSDIALEYIKQWADINAEYNIKLWYDSEAFLVNTLKKAIVESSTTEALQLLEEEIQNPQFDNMKFYKKRMEFIYDRQKRFINYYKSQINKPTVPTIDDIIKSHLVSEYNRDETVLESYRTNSLRKINSNHGIDIRANSLFTEQELLNIYSQELLNRGNLAAASDIVRLLALKNFGGVALAVAMLPGIHSDLFKTISRPSSIGLDRWEMIKLEAIMKYKKYINNYTSENFDKLDQQLKDNFKLIIESKSEKSEIFSKLENLNVSDLEIKIAFALGSVINQALISKQGSYLTNLVIEQVKNRYQFLNQHLNPAIESDNNFTDTTKIFHDSLFNSATAENSMFLTKIAPYLQVGFMPEARSTISLSGPGAYASAYYDFINLQENTIEKTLKASDLIEFKFPENNLSQLTEQEINSLWSFDQASAKYQFEKYVRDYTGGS

SEQ ID NO: 57 - DNA, 1623 bp, Artificial Sequence
  Mutated sequence
atgtctttaatatctaaagaagagttaataaaactcgcatatagcattagaccaagagaaaatgagtataaaactatactaactaatttagacgaatataataagttaactacaaacaataatgaaaataaatatttacaattaaaaaaactaaatgaatcaattgatgtttttatgaataaatataaaacttcaagcagaaatagagcactctctaatctaaaaaaagatatattaaaagaagtaattcttattaaaaattccaatacaagccctgtagaaaaaaatttacattttgtatggataggtggagaagtcagtgatattgctcttgaatacataaaacaatgggctgatattaatgcagaatataatattaaactgtggtatgatagtgaagcattcttagtaaatacactaaaaaaggctatagttgaatcttctaccactgaagcattacagctactagaggaagagattcaaaatcctcaatttgataatatgaaattttacaaaaaaaggatggaatttatatatgatagacaaaaaaggtttataaattattataaatctcaaatcaataaacctacagtacctacaatagatgatattataaagtctcatctagtatctgaatataatagagatgaaactgtattagaatcatatagaacaaattctttgagaaaaataaatagtaatcatgggatagatatcagggctaatagtttgtttacagaacaagagttattaaatatttatagtcaggagttgttaaatcgtggaaatttagctgcagcatctgacatagtaagattattagccctaaaaaattttggcggagtagccttagccgttgccatgcttccaggtattcactctgatttatttaaaacaatatctagacctagctctattggactagaccgttgggaaatgataaaattagaggctattatgaagtataaaaaatatataaataattatacatcagaaaactttgataaacttgatcaacaattaaaagataattttaaactcattatagaaagtaaaagtgaaaaatctgagatattttctaaattagaaaatttaaatgtatctgatcttgaaattaaaatagctttcgctttaggcagtgttataaatcaagccttgatatcaaaacaaggttcatatcttactaacctagtaatagaacaagtaaaaaatagatatcaatttttaaaccaacaccttaacccagccatagagtctgataataacttcacagatactactaaaatttttcatgattcattatttaattcagctaccgcagaaaactctatgtttttaacaaaaatagcaccatacttacaagtaggttttatgccagaagctcgctccacaataagtttaagtggtccaggagcttatgcgtcagcttactatgatttcataaatttacaagaaaatactatagaaaaaactttaaaagcatcagatttaatagaatttaaattcccagaaaataatctatctcaattgacagaacaagaaataaatagtctatggagctttgatcaagcaagtgcaaaatatcaatttgagaaatatgtaagagattatactggtggatct

SEQ ID NO: 58 - protein, 766 aa, Artificial Sequence
  Mutated sequence
SLVNRKQLEKMANVRFRTQEDEYVAILDALEEYHNMSENTVVEKYLKLKDINSLTDIYIDTYKKSGRNKALKKFKEYLVTEVLELKNNNLTPVEKNLHFVWIGGQINDTAINYINQWKDVNSDYNVNVFYDSNAFLINTLKKTVVESAINDTLESFRENLNDPRFDYNKFFRKRMEIIYDKQKNFINYYKAQREENPELIIDDIVKTYLSNEYSKEIDELNTYIEESLNKITQNSGNDVRNFEEFKNGESFNLYEQELVERWNLAAASAILAISALKEIGGMALAVAMLPGIQPDLFESIEKPSSVTVDFWEMTKLEAIMKYKEYIPEYTSEHFDMLDEEVQSSFESVLASKSDKSEIFSSLGDMEASPLEVKIAFNSKGIINQGLISVKDSYCSNLIVKQIENRYKILNNSLNPAISEDNDFNTTTNTFIDSIMAEANADNGRFMMELGKYLRVGFFPDVKTTINLSGPEAYAAAYQDLLMFKEGSMNIHLIEADLRNFEISKTNISQSTEQEMASLWSFDDARAKAQFEEYKRNYFEGSLGEDDNLDFSQNIVVDKEYLLEKISSLARSSERGYIHYIVQLQGNKISYEAACNLFAKTPYDSVLFQKNIEDSEIAYYYNPGDGEIQEIDKYKIPSIISDRPKIKLTFIGAGKDEFNTDIFAGFDVDSLSTEIEAAIDLAKEDISPKSIEINLLGANMFSYSINVEETYPGKLLLKVKDKISELMPSISQDSIIVSANQYEVRINSEGRRELLDHSGEWINKEES

SEQ ID NO: 59 - DNA, 2303 bp, Artificial Sequence
  Mutated sequence
ggcagtctggttaaccgtaaacaactggaaaaaatggcgaatgtgcgctttagaacccaggaagatgaatatgttgcgattctagatgcactggaagaataccataacatgtcagagaataccgtggtagaaaaatatctgaaactgaaagatattaactctctgacggatatctatattgacacgtacaaaaaaagcggtcgtaataaagctctgaaaaaatttaaggaatatctcgttacggaagtgctggagctcaagaacaataacctgaccccggttgagaaaaatctgcatttcgtttggatcggcggtcagattaacgacaccgccatcaattacattaaccagtggaaagatgtgaatagcgattataacgttaatgtcttttatgactcgaacgcgtttctaattaacacgctaaaaaaaaccgtggtggaaagcgcgattaatgatactcttgagagctttcgcgaaaacctgaacgacccacgtttcgactacaataaattcttccgcaaaagaatggaaattatctatgataaacaaaaaaacttcattaactactataaagcacaacgtgaagaaaatccggaactgattatcgacgatatcgtgaagacgtacttgagcaacgagtatagcaaggagattgatgaacttaatacatacatcgaagaatcactgaacaaaatcacgcaaaatagtggcaacgacgttcgcaactttgaggaatttaaaaatggcgagagcttcaacttatatgaacaggagctagtggaacgatggaacctggccgcagcctccgcgattctggcgatttctgcgctgaaagaaatcggtggtatggcgctggcggtcgcgatgctgccgggcattcagccggacctgtttgagtccattgagaaacctagtagcgtgacggtagacttctgggaaatgacgaagttagaagcaattatgaaatacaaagaatatattccggaatacacaagcgaacactttgacatgctggacgaggaagttcagtcgagctttgaatctgtcctcgccagcaagagcgataaaagcgaaattttcagcagcctgggtgatatggaggcgagcccgctcgaagttaaaatcgcgtttaattcgaagggtatcattaaccaaggactcatctccgtaaaagacagctattgttcaaatctgattgtgaaacagatagagaaccgctataaaattctaaataacagtctgaatccggcaatctcagaggacaacgatttcaataccactacaaacacatttatcgatagtattatggccgaagcaaatgcggacaacggtcgttttatgatggaactcggtaagtacctgcgcgtcggtttcttcccggatgttaaaaccaccatcaacttatcgggaccagaagcgtatgctgcggcctaccaggatctgctgatgtttaaagaaggaagcatgaatatacatctaattgaagcagacctgcgtaacttcgagatatctaaaaccaacatctcccaaagcaccgaacaggaaatggcctcactgtggagctttgacgatgcgcgcgcaaaagcccagtttgaagaatataaacgaaattactttgaaggtagcttgggtgaagatgacaaccttgatttctctcaaaatattgtggtcgacaaggagtatctgctggaaaaaatttccagcttagcgcgttcgagcgagcgcggctatattcactacatcgttcaactgcagggcaacaaaatcagttatgaagcggcgtgcaacctgtttgcgaagaccccgtatgacagtgtgctatttcaaaaaaacattgaagatagcgagatcgcgtactattacaatcctggcgatggtgaaattcaggaaattgacaagtataaaatcccgtcgattatctctgaccgtccaaagatcaaactgacgtttatcggtgcgggtaaagatgaattcaacaccgatatttttgcgggttttgacgtggatagcctgtcaacggaaattgaagcggcgattgatttagcaaaagaggacatctccccgaagagcattgaaattaatctgctgggcgcgaacatgttttcatacagcataaacgtggaggagacctatcctggtaaactgctgttgaaagtcaaagataaaattagcgaattaatgccgtctattagccaagactccatcattgtgtcggcgaatcagtacgaagttcgcattaacagtgaaggccgtcgcgagctgctagatcattctggtgaatggattaataaagaagaaagtgg

SEQ ID NO: 60 - protein, 542 aa, Artificial Sequence
  Mutated sequence
SLVNRKQLEKMANVRFRTQEDEYVAILDALEEYHNMSENTVVEKYLKLKDINSLTDIYIDTYKKSGRNKALKKFKEYLVTEVLELKNNNLTPVEKNLHFVWIGGQINDTAINYINQWKDVNSDYNVNVFYDSNAFLINTLKKTVVESAINDTLESFRENLNDPRFDYNKFFRKRMEIIYDKQKNFINYYKAQREENPELIIDDIVKTYLSNEYSKEIDELNTYIEESLNKITQNSGNDVRNFEEFKNGESFNLYEQELVERWNLAAASAILAISALKEIGGMALAVAMLPGIQPDLFESIEKPSSVTVDFWEMTKLEAIMKYKEYIPEYTSEHFDMLDEEVQSSFESVLASKSDKSEIFSSLGDMEASPLEVKIAFNSKGIINQGLISVKDSYCSNLIVKQIENRYKILNNSLNPAISEDNDFNTTTNTFIDSIMAEANADNGRFMMELGKYLRVGFFPDVKTTINLSGPEAYAAAYQDLLMFKEGSMNIHLIEADLRNFEISKTNISQSTEQEMASLWSFDDARAKAQFEEYKRNYFEGSL

SEQ ID NO: 61 - DNA, 1626 bp, Artificial Sequence
  Mutated sequence
agtctggttaaccgtaaacaactggaaaaaatggcgaatgtgcgctttagaacccaggaagatgaatatgttgcgattctagatgcactggaagaataccataacatgtcagagaataccgtggtagaaaaatatctgaaactgaaagatattaactctctgacggatatctatattgacacgtacaaaaaaagcggtcgtaataaagctctgaaaaaatttaaggaatatctcgttacggaagtgctggagctcaagaacaataacctgaccccggttgagaaaaatctgcatttcgtttggatcggcggtcagattaacgacaccgccatcaattacattaaccagtggaaagatgtgaatagcgattataacgttaatgtcttttatgactcgaacgcgtttctaattaacacgctaaaaaaaaccgtggtggaaagcgcgattaatgatactcttgagagctttcgcgaaaacctgaacgacccacgtttcgactacaataaattcttccgcaaaagaatggaaattatctatgataaacaaaaaaacttcattaactactataaagcacaacgtgaagaaaatccggaactgattatcgacgatatcgtgaagacgtacttgagcaacgagtatagcaaggagattgatgaacttaatacatacatcgaagaatcactgaacaaaatcacgcaaaatagtggcaacgacgttcgcaactttgaggaatttaaaaatggcgagagcttcaacttatatgaacaggagctagtggaacgatggaacctggccgcagcctccgcgattctggcgatttctgcgctgaaagaaatcggtggtatggcgctggcggtcgcgatgctgccgggcattcagccggacctgtttgagtccattgagaaacctagtagcgtgacggtagacttctgggaaatgacgaagttagaagcaattatgaaatacaaagaatatattccggaatacacaagcgaacactttgacatgctggacgaggaagttcagtcgagctttgaatctgtcctcgccagcaagagcgataaaagcgaaattttcagcagcctgggtgatatggaggcgagcccgctcgaagttaaaatcgcgtttaattcgaagggtatcattaaccaaggactcatctccgtaaaagacagctattgttcaaatctgattgtgaaacagatagagaaccgctataaaattctaaataacagtctgaatccggcaatctcagaggacaacgatttcaataccactacaaacacatttatcgatagtattatggccgaagcaaatgcggacaacggtcgttttatgatggaactcggtaagtacctgcgcgtcggtttcttcccggatgttaaaaccaccatcaacttatcgggaccagaagcgtatgctgcggcctaccaggatctgctgatgtttaaagaaggaagcatgaatatacatctaattgaagcagacctgcgtaacttcgagatatctaaaaccaacatctcccaaagcaccgaacaggaaatggcctcactgtggagctttgacgatgcgcgcgcaaaagcccagtttgaagaatataaacgaaattactttgaaggtagcttg

SEQ ID NO: 62 - protein, 228 aa, Artificial Sequence
  Mutated sequence
LSEDNGVDFNKNTALDKNYLLNNKIPSNNVEEAGSKNYVHYIIQLQGNDISYEATCNLFSKNPKNSIIIQRNMNESAKSYFLSDDGESILELNKYRIPERLKNKEKVKVTFIGAGKDEFNTSEFARLSVDSLSNEISSFLDTIKLDISPKNVEVNLLGANMFSYDFNVEETYPGKLLLSIMDKITSTLPDVNKNSITIGANQYEVRINSEGRKELLAHSGKWINKEEA

SEQ ID NO: 63 - DNA, 735 bp, Artificial Sequence
  Mutated sequence
atgggcagcagccatcatcatcatcatcacgaaaacctgtacttccagggcctgtccgaagacaatggagtggacttcaacaaaaataccgctctagacaaaaactatctgctgaacaataaaatcccgagcaacaacgtggaagaagcaggctcgaaaaattacgttcattatataattcaattacagggcaacgatattagctacgaagcgacgtgcaacctgttttctaaaaatccaaaaaacagtatcatcattcaaaggaatatgaacgagtcggcgaaatcatactttctgagtgatgacggcgaaagcatcctggaactgaataaatatcgaattcctgaacgtctgaaaaacaaggaaaaagtgaaagtgacattcatcggtgcgggtaaagatgaattcaacacttcagaatttgcccgcctgtcggtggatagcctttcaaatgagattagcagctttttagacacaattaaactggatattagcccgaaaaacgtggaagtgaacctgttgggcgcgaatatgttcagttatgattttaacgtcgaagaaacctacccaggaaagctactcctgtcgatcatggacaaaatcacctcaaccctgcctgacgtgaataaaaactccatcaccattggcgcgaatcagtatgaggtgcgtatcaacagtgagggccgcaaagaactgctagcacacagcggtaaatggattaataaagaagaagcc

SEQ ID NO: 64 - protein, 224 aa, Artificial Sequence
  Mutated sequence
GEDDNLDFSQNIVVDKEYLLEKISSLARSSERGYIHYIVQLQGNKISYEAACNLFAKTPYDSVLFQKNIEDSEIAYYYNPGDGEIQEIDKYKIPSIISDRPKIKLTFIGAGKDEFNTDIFAGFDVDSLSTEIEAAIDLAKEDISPKSIEINLLGANMFSYSINVEETYPGKLLLKVKDKISELMPSISQDSIIVSANQYEVRINSEGRRELLDHSGEWINKEES

SEQ ID NO: 65 - DNA, 672 bp, Artificial Sequence
  Mutated sequence
ggtgaagatgacaaccttgatttctctcaaaatattgtggtcgacaaggagtatctgctggaaaaaatttccagcttagcgcgttcgagcgagcgcggctatattcactacatcgttcaactgcagggcaacaaaatcagttatgaagcggcgtgcaacctgtttgcgaagaccccgtatgacagtgtgctatttcaaaaaaacattgaagatagcgagatcgcgtactattacaatcctggcgatggtgaaattcaggaaattgacaagtataaaatcccgtcgattatctctgaccgtccaaagatcaaactgacgtttatcggtgcgggtaaagatgaattcaacaccgatatttttgcgggttttgacgtggatagcctgtcaacggaaattgaagcggcgattgatttagcaaaagaggacatctccccgaagagcattgaaattaatctgctgggcgcgaacatgttttcatacagcataaacgtggaggagacctatcctggtaaactgctgttgaaagtcaaagataaaattagcgaattaatgccgtctattagccaagactccatcattgtgtcggcgaatcagtacgaagttcgcattaacagtgaaggccgtcgcgagctgctagatcattctggtgaatggattaataaagaagaaagt

SEQ ID NO: 66 - DNA, 624 bp, Artificial Sequence
  Mutated sequence
catatgcgttactacttcgataccgatacagccatcgcttttaacggttataaaaccatcgacggtaaacacttttactttgatagcgattgtgtggtaaaaattggtgtattctcgacaagcaatggctttgaatattttgcgccggcaaacacctataataacaacattgaaggtcaagccattgtctaccagagtaaattcctgaccctaaatggtaaaaaatattacttcgacaacaacagcaaagcggttacaggctggcagaccatcgattcgaaaaaatattactttaataccaacaccgcagaagcggccaccggttggcaaaccatcgatggtaaaaaatactactttaacaccaacaccgcagaagcggccaccggctggcagaccatcgacggtaaaaaatattacttcaataccaacaccgcaattgccagcaccggttacacgatcatcaacggtaaacatttttattttaataccgatggtatcatgcaaattggcgtattcaaaggcccaaacggctttgaatattttgcgcctgcaaatacagatgccaacaacattgagggtcaggcaattttgtaccaaaacgaattcctgaccctaaatctcgag

SEQ ID NO: 67 - DNA, 2601 bp, Artificial Sequence
  Mutated sequence
catatggacccaattgaatttaacctggtgaccggttggcaaaccataaacggtaaaaaatattattttgacattaataccggcgcggcactgatcagttacaaaatcatcaacggtaaacacttttatttcaataacgatggtgtaatgcaactaggcgtgtttaaaggccctgatggttttgaatacttcgcgccggctaatacccagaacaataacattgaaggtcaagccattgtctatcagtcgaaattcttaaccctaaacggaaaaaaatattactttgacaatgacagcaaagcggtaaccggctggcgcatcatcaacaacgagaaatattactttaatccaaacaatgcaatcgccgcggtaggcctacaagtgatcgacaacaataagtattacttcaaccctgacaccgcaataataagcaaaggttggcaaaccgttaatggtagtcgttactacttcgataccgatacagccatcgcttttaacggttataaaaccatcgacggtaaacacttttactttgatagcgattgtgtggtaaaaattggtgtattctcgacaagcaatggctttgaatattttgcgccggcaaacacctataataacaacattgaaggtcaagccattgtctaccagagtaaattcctgaccctaaatggtaaaaaatattacttcgacaacaacagcaaagcggttacaggctggcagaccatcgattcgaaaaaatattactttaataccaacaccgcagaagcggccaccggttggcaaaccatcgatggtaaaaaatactactttaacaccaacaccgcagaagcggccaccggctggcagaccatcgacggtaaaaaatattacttcaataccaacaccgcaattgccagcaccggttacacgatcatcaacggtaaacatttttattttaataccgatggtatcatgcaaattggcgtattcaaaggcccaaacggctttgaatattttgcgcctgcaaatacagatgccaacaacattgagggtcaggcaattttgtaccaaaacgaattcctgaccctaaatggtaaaaaatactacttcggtagtgacagcaaagcggtcaccggttggcgcatcatcaacaacaagaaatattactttaatccgaacaatgccatcgcagcgatccatctctgcaccattaacaatgacaagtattactttagctacgacggcatcctgcagaacggctatatcaccatcgaacgtaataacttctacttcgatgccaataacgaatccaaaatggtgacgggcgtgtttaaaggcccaaatggttttgagtatttcgcgccggcaaacacccacaataacaacattgaaggtcaagccattgtttaccaaaacaaattcctgaccctaaatggaaaaaaatattactttgataacgacagcaaagcggtcaccggctggcagacaatcgacggtaaaaaatattactttaatcttaacaccgcagaagcggccaccggctggcaaaccatcgatggtaaaaaatattacttcaacttgaacaccgcagaagcggccaccggctggcagaccatcgatggtaaaaaatactactttaataccaacaccttcattgctagcaccggttatacttcgatcaacggtaaacatttttactttaataccgacggtatcatgcaaattggcgtattcaaaggtcctaacggctttgaatactttgcgccagcaaatacccacaacaataacattgaaggtcaggccattctgtaccaaaacaaattcctgaccctaaatggtaaaaaatattacttcggtagtgacagcaaagcggttacaggcctaaggaccatcgatggtaaaaaatattactttaacaccaacaccgcagtcgcggttaccggctggcagaccatcaatggtaaaaaatactactttaacaccaacacctctattgccagcaccggttacacgatcatctcgggtaaacatttctattttaataccgatggtatcatgcaaattggcgtatttaaaggtccggacggcttcgaatactttgcgcctgcaaacacggatgccaacaatattgagggtcaggcaattagatatcaaaaccgcttcctctacctgcatgacaatatttattactttggtaacaatagcaaagcggccaccggttgggtgaccatcgatggtaaccgttattacttcgagccaaatacggcaatgggtgctaacggttataaaaccatcgacaataaaaacttctactttcgcaatggtctgccgcaaattggcgtatttaaaggatctaacggcttcgaatactttgcgcctgccaatacagatgcaaacaacattgaaggtcaggccattagataccaaaatcgtttcctccatttacttggcaaaatttattactttggtaacaatagcaaagcggtcaccggttggcaaaccatcaacggtaaagtgtattactttatgccagataccgcaatggccgcggcaggtggcttgttcgagatcgacggtgttatttacttcttcggtgtcgatggcgtgaaagctccgctcgag

SEQ ID NO: 68 - DNA, 1548 bp, Artificial Sequence
  Mutated sequence
attaccggcttcgtaaccgtgggagacgataaatactactttaacccgatcaatggtggtgccgcaagcatcggcgagacgattatcgatgacaaaaactattatttcaaccagagcggcgtactgcaaacgggtgtgttttcgacggaggacggcttcaaatactttgctccggccaatactctggatgaaaacctcgaaggcgaagcgatcgattttaccggtaaactgatcatcgacgaaaacatctattattttgacgataattaccgtggcgcagtggaatggaaagaactggatggtgagatgcactatttctcaccggaaacgggtaaagcctttaaaggtctcaaccagattggtgactacaaatactatttcaattccgatggcgtcatgcagaaaggctttgttagtattaacgataataaacactattttgacgattctggtgtcatgaaagtgggttacaccgaaattgatggaaagcatttctacttcgcagaaaacggcgaaatgcagattggtgtgtttaacacggaagacggctttaaatacttcgcccaccataatgaagatttaggcaacgaagagggtgaagaaataagctattccggtattctgaatttcaacaataaaatctactactttgatgacagctttactgcagtggttggctggaaagatctggaggacggtagcaagtattatttcgatgaagatacggcggaagcgtacattggtctaagcctgattaacgacggtcaatattactttaatgatgatggcatcatgcaggtcggttttgtaaccattaacgacaaagtattctacttcagcgactctggcatcattgaatccggcgtgcagaacattgatgacaattatttctatattgatgacaacggtattgttcagatcggtgtgtttgataccagcgatggctacaaatatttcgcgccggccaataccgtgaacgacaatatctacggccaagcggtcgaatatagtggtctggttcgcgtcggtgaagatgtgtactattttggtgagacgtatactatcgagaccggctggatttacgatatggaaaacgaatcggacaaatattacttcaatccggaaaccaaaaaagcgtgcaaaggtatcaacctgatcgatgatattaaatattattttgacgagaagggaattatgcgtacaggtttgattagcttcgaaaataacaattactactttaacgagaatggtgaaatgcagtttggttatattaacattgaagataagatgttctactttggtgaagatggtgtaatgcaaatcggcgtgttcaatacgccggacggctttaaatactttgcgcatcagaacaccctagatgagaattttgagggcgagagcattaactataccggttggctggatttagacgaaaagcgctactatttcacggatgaatatatcgcggcgaccggtagcgttatcatcgatggtgaggagtactattttgaccctgatacggcacaactggtaatcagcgaactcgag

SEQ ID NO: 69 - DNA, 636 bp, Artificial Sequence
  Mutated sequence
gttcagatcggtgtgtttgataccagcgatggctacaaatatttcgcgccggccaataccgtgaacgacaatatctacggccaagcggtcgaatatagtggtctggttcgcgtcggtgaagatgtgtactattttggtgagacgtatactatcgagaccggctggatttacgatatggaaaacgaatcggacaaatattacttcaatccggaaaccaaaaaagcgtgcaaaggtatcaacctgatcgatgatattaaatattattttgacgagaagggaattatgcgtacaggtttgattagcttcgaaaataacaattactactttaacgagaatggtgaaatgcagtttggttatattaacattgaagataagatgttctactttggtgaagatggtgtaatgcaaatcggcgtgttcaatacgccggacggctttaaatactttgcgcatcagaacaccctagatgagaattttgagggcgagagcattaactataccggttggctggatttagacgaaaagcgctactatttcacggatgaatatatcgcggcgaccggtagcgttatcatcgatggtgaggagtactattttgaccctgatacggcacaactggtaatcagcgaactcgag

SEQ ID NO: 70 - DNA, 1521 bp, Clostridium difficile
atgtcaagtataagtccagtaagagttacaggcctttcaggaaattttgatatggaaggtataatagaagctagtatgataagagataaggaaaaagttaataaagcgaaacaagatcaacaaatagttaaatggaaacaagaaatatacagggatattataaaagagtcaaagaatctttatgacaagtatttaaatggagactctcctaatagtataacaaataaaaaagcatattctgctacaagaataactagttctgatgaaagtattatagtagcaaaaggctcagctggtgcagaaaaaataaattatcaatttgcagtttctcaaatggctgaaccagcaaaagtaactattaagttaaattcaagtgaccctattgttcaacagtttcctccaaatgctagtggagcaagttctttaaatataggtggtgtaaatataccaatatctgaacaagatactacaagtactattgtaagtaagataaactccctttgtgcagataatgatataagagcttcttatagtgagatgacaggtgaattgattatctcaagaaaacagactggttcatcatcagatattgatttaaaagtaattggaaatgatagtttagctggacaaattgccagtgataatggtattacatttacaactgatgctagtggaactaaatctgcagtagtatatggaaaaaatttagaagctgatgtaactgatgaccaaggaagagtaacacacataagtaaagaacagaattcatttaaaatagataacattgattataatgtaaattcaaaaggaagtgctaaactggtttctgttactgacactgaagaagctactaaaaatatgaaagcatttgtagatgattataatgcattgatggataaggtttatggattagttactactaaaaaatcaaaagattatccacctcttacagatgaacaaaaagatgatatgacaactgaagaaatagaaaagtgggaaaagaaggcaaaggaaggaatacttagaaatgatgatgaattaagagcttttgttgaagatattcagtctatgttttttggagatgcagatactattattgctttaagaaaactgggtattagtgagcatgagaattataacaaaaaaggacaaatatcatttaatgcagatactttttcgaaggctcttatagatgatagtgacaaggtatataaagctttagctggatattcttcaaattatgatgataagggtatgtttgaaaaattaaaaaaaattgtatttgaatattctggaagttcagcttctaaacttactaaaaaagcaggtatggaaaattcttcgtctgctagtcaaaatgtatattcaaaacaaattgcagagcaagaaagaaatataagtaggttagttgaaaaaatgaatgataaagagaaaagactttatgctaaatattcagctttagagtctttgttgaataaatattcttcacaaatgaactatttctcacaagcacaaggtaat

SEQ ID NO: 71 - protein, 507 aa, Clostridium difficile
MSSISPVRVTGLSGNFDMEGIIEASMIRDKEKVNKAKQDQQIVKWKQEIYRDIIKESKNLYDKYLNGDSPNSITNKKAYSATRITSSDESIIVAKGSAGAEKINYQFAVSQMAEPAKVTIKLNSSDPIVQQFPPNASGASSLNIGGVNIPISEQDTTSTIVSKINSLCADNDIRASYSEMTGELIISRKQTGSSSDIDLKVIGNDSLAGQIASDNGITFTTDASGTKSAVVYGKNLEADVTDDQGRVTHISKEQNSFKIDNIDYNVNSKGSAKLVSVTDTEEATKNMKAFVDDYNALMDKVYGLVTTKKSKDYPPLTDEQKDDMTTEEIEKWEKKAKEGILRNDDELRAFVEDIQSMFFGDADTIIALRKLGISEHENYNKKGQISFNADTFSKALIDDSDKVYKALAGYSSNYDDKGMFEKLKKIVFEYSGSSASKLTKKAGMENSSSASQNVYSKQIAEQERNISRLVEKMNDKEKRLYAKYSALESLLNKYSSQMNYFSQAQGN

SEQ ID NO: 72 - DNA, 870 bp, Clostridium difficile
atgagagttaatacaaatgtaagtgctttgatagcaaacaatcaaatgggaagaaacgtaaatggacaaagtaagtctatggagaagttatcttctggggttagaatcaagagagctgctgatgatgctgctggacttgcaatatctgagaaaatgagagctcaaataaaaggtttagaccaagcaggaagaaacgttcaagatggtatatctgttgtacaaacagcagaaggttcgttagaagaaactggaaatatactacaaagaatgagaactttatcattacaatctgcaaatgaaattaataatactgaagaaagagaaaagatagctgatgagttaacacaattaaaagatgagattgaaagaatatcaagttcaacagagtttaacggtaagaagctacttgatggaacttcttcaacaataagattacaagttggagcaagttatggaactaatgtttcaggtacaagtaataataacaatgagataaaaattcaattagtaaatactgcaagtataatggcttcagctggtataacaactgcttcaataggaagtatgaaggcaggtggaactacaggaacagatgcagctaaaactatggtatctagcttagatgcagctcttaagagcttaaactcatcaagagcaaaattaggagcacaacaaaacagactagaatcaactcaaaacaatttaaataatactttagagaatgttacagcagcagaatcaagaataagagatacagatgttgcttcagaaatggttaacttatctaaaatgaatatattagttcaagcatcacaatcaatgcttgctcaagctaatcaacaaccacaaggagttttacaattattagga

SEQ ID NO: 73 - protein, 290 aa, Clostridium difficile
MRVNTNVSALIANNQMGRNVNGQSKSMEKLSSGVRIKRAADDAAGLAISEKMRAQIKGLDQAGRNVQDGISVVQTAEGSLEETGNILQRMRTLSLQSANEINNTEEREKIADELTQLKDEIERISSSTEFNGKKLLDGTSSTIRLQVGASYGTNVSGTSNNNNEIKIQLVNTASIMASAGITTASIGSMKAGGTTGTDAAKTMVSSLDAALKSLNSSRAKLGAQQNRLESTQNNLNNTLENVTAAESRIRDTDVASEMVNLSKMNILVQASQSMLAQANQQPQGVLQLLG

SEQ ID NO: 74 - DNA, 960 bp, Clostridium difficile
atgagagtgagaaaaattttatctttaggaattgctggaatactagcaataggaatgttaacagggtgttcaatggaaggaccaagtaaatcagataataaaggtggttcagacaagaaagatttaactattggagtatctacaataactcttcaacatcaattttttatagatattgatgagggaataaaagaaaaagctaaagaattaggtgtgaaagttatagtaaatgacccagaccaagatgtagctaagcaaacatcagcaatagaagattttatacaacaaaatgtagatggaatgatagtacttggaactgataattcggctatagtaccagcagtagaaggagcatttgaaaaaatgccagtagttacagtagatgctgtattaaatactgaaaatattacaagttatgtaggaacagttagttatgatgctggtaaaaaattaggggaatacactaaaaaatacatagatgaaaagttaggtggaaagtcagaaatagcaatagtgacagatttaaaatctcaaatacaaatgcagagaatagatggatttaaagatgcattaaaaggttcagcaaatgttaagatattaaattcacaaccaggatatgacagagaagaatctcttaatacagtagaaaacttaattcaatctaatccagatgtagatataatatatgcaacagctgaaaatagtgtactaggagctaaagctgcacttgaatctgcaaaaaataaggatgttaagattgtaggatttgacttaactgaagaagcatcaagtggaataacagatggaactattcttgctatgattcaacaacaacctaaagagatgggacgtttagctgtagaagcagtagtaaaagctataaaaggggaaaaggtagaaaagaatataccagtaccagctttactttatgataaggaaaatataaaagactttaagaat

SEQ ID NO: 75 - protein, 320 aa, Clostridium difficile
MRVRKILSLGIAGILAIGMLTGCSMEGPSKSDNKGGSDKKDLTIGVSTITLQHQFFIDIDEGIKEKAKELGVKVIVNDPDQDVAKQTSAIEDFIQQNVDGMIVLGTDNSAIVPAVEGAFEKMPVVTVDAVLNTENITSYVGTVSYDAGKKLGEYTKKYIDEKLGGKSEIAIVTDLKSQIQMQRIDGFKDALKGSANVKILNSQPGYDREESLNTVENLIQSNPDVDIIYATAENSVLGAKAALESAKNKDVKIVGFDLTEEASSGITDGTILAMIQQQPKEMGRLAVEAVVKAIKGEKVEKNIPVPALLYDKENIKDFKN

SEQ ID NO: 76 - DNA, 801 bp, Clostridium difficile
atgaataaaaagggttttacactaattgaattgttagtagttatatctataataggcattttagttatagtagctattccagcattgtttagaaatatagaaaaaagtaaagcagttacatgtctttctaatagagaaaatataaagactcaaattgttattgcaatggctgaggaatcaagtaagggcaagaatgaagtcatgaaagaggtattagaaaacaaagatggtaagtactttgaaacagaaccaaagtgtaagtcaggtggaatatattcagcaacgtttgatgatggttatgatggaataactggaatagaaagcattgcaaaagtgtatgttacttgtacaaaacatccagatggtgttgaaatggctagggatatacatcaaagtatgaaagatttgattgcatcattttcacaagacccttctataataccaggagcctcaaagggtaatgatgattttagaaaatatttattagacaataaatataaaaatgggtggcctacaattccagatgaatttaaggcaaaatatggattaagtaaggatacactatatatacaaccatatgcatatagtcctactaaatctgatgctactgtagttgtatttgcaaataataagactgggggtaattggtatacttccctagtttacgattatgatgaaggtagatggtataaaggtaaaaatggtatttctgttgcaggtaggtcatgggatgttgacacagatagtgttaagtctgtaaaaacagagattcattctaaagagggatggggtcctttaaat

SEQ ID NO: 77 - protein, 267 aa, Clostridium difficile
MNKKGFTLIELLVVISIIGILVIVAIPALFRNIEKSKAVTCLSNRENIKTQIVIAMAEESSKGKNEVMKEVLENKDGKYFETEPKCKSGGIYSATFDDGYDGITGIESIAKVYVTCTKHPDGVEMARDIHQSMKDLIASFSQDPSIIPGASKGNDDFRKYLLDNKYKNGWPTIPDEFKAKYGLSKDTLYIQPYAYSPTKSDATVVVFANNKTGGNWYTSLVYDYDEGRWYKGKNGISVAGRSWDVDTDSVKSVKTEIHSKEGWGPLN

SEQ ID NO: 78 - DNA, 939 bp, Clostridium difficile
atgaggattagtaaaaaggtattggcgttaggtatttcagcattactattaagtgttagttttccaacatcaataaacgcactagataagattgaaaatattcaaggagtagataaatatgaaacagctgggcttatttcagataagcaagattttacaacagcagttcttatcaatgcagactctacaatggtagatggaattgctgcaagtggtcttgcaggagtaaataatgcagctattttattaactaataaggatgatataccagaagcaacgcttcaaagactgaatagagttactaagatatatgtaataggtggagaaaattctataagtaaagatgtagaaaaaatgttacttatgagaagaatgcaagttataagaattgatggtgtagatagagtagatacaagttataaaattgcaggcgaaatagaaaaaattaaaaacagtgataagatgtttttagtaaatggatttaaggatgaagctgatgcagtaagtgttgcatctgttgcttatagagatggagctcctataatattgacaaaagatataccttcagcagaagaagacacagacttagacccatggtttggagtttctcctgttccagtatatgctattggaggagagtctacattaagtgattacatagtgagcagatatagagcaactagaattggcggtgttgatagatatcaaactaataaaaatgttattgaaaagttctataatggagcaaaagagttctatataacaagtggagacgatttagtttatgctttagttgcatcaccacttgcaaaaaatgctcctgttgttttagtttcaaataaaagtgataagagtatattaagtggagctagtaaagtaacagcaataggtataagtgataagagtattatagagcaatgtttggatgctgtaaagaag

SEQ ID NO: 79 - protein, 313 aa, Clostridium difficile
MRISKKVLALGISALLLSVSFPTSINALDKIENIQGVDKYETAGLISDKQDFTTAVLINADSTMVDGIAASGLAGVNNAAILLTNKDDIPEATLQRLNRVTKIYVIGGENSISKDVEKMLLMRRMQVIRIDGVDRVDTSYKIAGEIEKIKNSDKMFLVNGFKDEADAVSVASVAYRDGAPIILTKDIPSAEEDTDLDPWFGVSPVPVYAIGGESTLSDYIVSRYRATRIGGVDRYQTNKNVIEKFYNGAKEFYITSGDDLVYALVASPLAKNAPVVLVSNKSDKSILSGASKVTAIGISDKSIIEQCLDAVKK

SEQ ID NO: 80 - DNA, 993 bp, Clostridium difficile
atgaaaaagtatatttctataatattattagtggtgttgactatggttgttttggtaggatgttcaccaggaaaagataaccctaaaaataaggagctatcagttgtcaaacaagtaaaagtagctgttccagatggactaccagcagtggcaatagctaaacttgcaaatgaaaatccagagattaaagaaggatatgaaacagtgtatagcattgaaaagacacctgaggcgatttccactagagtgatgaaaaaagatgcagatatagctatagttccttcaaacatggctgcaatagcgtataataaaacttcatcatataatattgttggaactgtaggaatgggttcactttatttggtgtcaacagaaaatataaaagattactctgatttagttggtaaagaagttggatgtactggaaaaggacttactccagacataactataaaaagtcttttgttacaaaaggatataaattattcagatataaaatttaattatgtaagttcagcaagtgaactggtaccattattggctactggtaaagttaaaacaggtattgttccagaacctgcacttagtgctttgatgtctaaaaatccagacataaaaattataaaaagtttaaatgactcatggaaggaagtaagtggttcaaaagacggttatcctcaatctactttaattgtaaagtctgaatttttaagagataataaagattttgttgattcttttgtaggtcaattatcaaatagtatagattgggcaaacaaaaatcctgaagaattaggtgcatattctgaaaaaataaaaatatctactgaatcaaagataataggaaaatctcttgaaagagctaatttgaaatatattccagttaaggacatgattaaagattataaaaattactatgagaaattagctaattttgatgataagacattaggaggcaaagtaccagatgaagcaatatactttgttgagaaa

SEQ ID NO: 81 - protein, 352 aa, Clostridium difficile
MKKYISIILLVVLTMVVLVGCSPGKDNPKNKELSVVKQVKVAVPDGLPAVAIAKLANENPEIKEGYETVYSIEKTPEAISTRVMKKDADIAIVPSNMAAIAYNKTSSYNIVGTVGMGSLYLVSTENIKDYSDLVGKEVGCTGKGLTPDITIKSLLLQKDINYSDIKFNYVSSASELVPLLATGKVKTGIVPEPALSALMSKNPDIKIIKSLNDSWKEVSGSKDGYPQSTLIVKSEFLRDNKDFVDSFVGQLSNSIDWANKNPEELGAYSTGTTCACCAGGAAAAGATAACEKIKISTESKIIGKSLERANLKYIPVKDMIKDYKNYYEKLANFDDKTLGGKVPDEAIYFVEK

SEQ ID NO: 82 - DNA, 1293 bp, Clostridium difficile
ttgttggggggagtgatagtagtgaaaaaagctatagcagctttaggaattggggcagtagcagtatctgttagctccataaatgcaagtgctcttgaaaagggaacagtaacagcaagtgccttgaatataagaagtggaccaagttctgattgcgataaggtagcaaaattatacaagggaaaaactgtagagattttagaaaagtctaatggatggtataaagtaagggtatcgagttctgttgttggatggggaagtgcaaaatacatatcaacaagtggttcgtctgaaggtacatcaagtcaaaataattcaacttcaagtgggacaactattagtggaaatggtaaagtaaatgtgagttctagactgaatgtaagaagtggtgcaggtactaactattcattagttggtaaagcaaataatggagatgtagtaaagttactagaacaaagcaatggatggtataaaataaaactatcaaatggagttactggatgggctagtagccaatatatctctaaaacatcagaggatgttggaacgaataattctagtaattcaaatagtactaataattctgataaaaaaccatctagcgaagaatcaattgaaggcaagaatggtaaggtaacatctgctgtgagtttaaatgtaagaagtggtcctgggacaagctattctataataggaaaattaaatggtggagatgttgttgaattaaaagctaaaagtaatggttggtataaggtaaagttatcgagtggaacaattggatgggtgagtgccagttatatttctgagactaatgaggatacaaaagaaaaaccaaattcatcatctaaccaaaattctcaatctaatagtaactcaaagccatcatttactggaaattcagataaatctacagcaaaaggttcaacaatcgtagattttgcatatactcttattggaataccatatcaatggggagcttcaggacctgataaatttgactgttctggatttacacagtatgtttttaaacattctgtaggcgtttctattcctagagtttctagagaacaggctaattttggaagtgcaatttctatggggaattatgcaccaggagatttagtttattttgacactgatggtgatggaacaactaatcatgtaggtatatatgtaggaaatagtaaatttatccattgtagtggtactcagactaatcctaataaggttaaagtggataatttaactagttcatattggtctaaagtattacttggtgcaagaagatttgtt

SEQ ID NO: 83 - protein, 431 aa, Clostridium difficile
MLGGVIVVKKAIAALGIGAVAVSVSSINASALEKGTVTASALNIRSGPSSDCDKVAKLYKGKTVEILEKSNGWYKVRVSSSVVGWGSAKYISTSGSSEGTSSQNNSTSSGTTISGNGKVNVSSRLNVRSGAGTNYSLVGKANNGDVVKLLEQSNGWYKIKLSNGVTGWASSQYISKTSEDVGTNNSSNSNSTNNSDKKPSSEESIEGKNGKVTSAVSLNVRSGPGTSYSIIGKLNGGDVVELKAKSNGWYKVKLSSGTIGWVSASYISETNEDTKEKPNSSSNQNSQSNSNSKPSFTGNSDKSTAKGSTIVDFAYTLIGIPYQWGASGPDKFDCSGFTQYVFKHSVGVSIPRVSREQANFGSAISMGNYAPGDLVYFDTDGDGTTNHVGIYVGNSKFIHCSGTQTNPNKVKVDNLTSSYWSKVLLGARRFV

SEQ ID NO: 84 - DNA, 801 bp, Clostridium difficile
atgaaaaaacttaaattaattattatgtttgccttggtatcagcactgttagttacaggatgttcatcaggaaataataaaaataaagaagaacaaaaagttataagagttgcaacatcaggaacatattacccttttgcttttaaagataaagataaacttaaagggtttgaagtagatttttgggatgaatttgctaaacgaactaattgtaaagttgaatgggtattaactgattttagtggattatttggattattagaagctgataaagcagatgctgtatctgctcaacttactgcaacacctgaaagagagaaaaaatatgctttttcagatgcttataattatagtggaacaaacattattgttagagaagatgatactagtataaaatcaatagatgatttagttggcaagaaagtaggtgtgggtactggagcagtagcaaatgaaatattaaaagaaaaatacccaaatgatgaaataaaaatagtaaattattcaagtgcgactcttaaagggaattatcaagacctagaaatgggaagattagatgcagtagttgcgcaggatgttgaggctttaatagctataaaagaacaaaaattaaatcttaaaatgatagaacctccaattcaatttggtgcctgttcttttgcgcttcaaaaaaatgaaaaaggtgaaaaatggacaaaagaaattaacgaagtaattgaagagatgtataaagatgggactttgactaaaatatctgaaaactggctaggaaaagacattactaaggagcctattaatgag

SEQ ID NO: 85 - protein, 267 aa, Clostridium difficile
MKKLKLIIMFALVSALLVTGCSSGNNKNKEEQKVIRVATSGTYYPFAFKDKDKLKGFEVDFWDEFAKRTNCKVEWVLTDFSGLFGLLEADKADAVSAQLTATPEREKKYAFSDAYNYSGTNIIVREDDTSIKSIDDLVGKKVGVGTGAVANEILKEKYPNDEIKIVNYSSATLKGNYQDLEMGRLDAVVAQDVEALIAIKEQKLNLKMIEPPIQFGACSFALQKNEKGEKWTKEINEVIEEMYKDGTLTKISENWLGKDITKEPINE

SEQ ID NO: 86 - DNA, 1617 bp, Clostridium difficile
gtgattataataaattatgaattaattgtaaaatacaatggagatatattgaggttagaagaagaattaggtgtatcagtagagatacttaattcatcatatgcaataataacatcaagtaatgaagaagatgtaaatatacttttaacttatccagaaattgaatttatagaaaagccttttatattacagactcaggatgtgcaaagtttttcaagtacaggaataacaggatttaaaaatagaactggtttaactggaaaaggaactataattggtataattgattcgggaatagattatactctacctgtgtttagagatagtgatggaaggtctaagatattatattattgggaccaatctattcaaggaaatccaccagaaggttttagagaaggaacattatatactaatgaagatataaataatgcaatagatggaagtatgtatatacctatttcaacaactagcttacatgggacacatgttgcaggtatttgtgcaactattgcaagtgatgccagaataatagtggttagagttggaaatatacagaccgatattttttcgagaagtacagagtttatgagggcaattaaatttattttagatagggcattagaattaagaatgcctgttacattaaatataagttatggaagtaatgaaggttcacatagaggaacatctttatttgaacaatatatagatgatatgtgtttattttggaaaaacaatatagttgtagcagctggaaataatgcagataaaggaggtcataaaaggattaggcttcaaaataatattacagaagaagttgagtttatagttggggaaggagagcgtatattaaacataaatatatggccagattttgttgatgattttagtgtacatttggtaaacccatcaaataatcaaacacaagcaatctctctaacttcaggtgagataaggaatactttgggtgaaactagaataactggttatttttaccctatagcaccgtattctctcacaagaagagttactctacaattaagttcaaatacacagataactcctgggttatggaaaattgtatttgaaccaatagatatagtaactggtaatgtaaatatatatttgccaacttctgaaggtctaaatagaaatactagatttctgattcctactcaagagcttactgtaacagttcctggaacagcaagtagagttataacagtaggtagttttaattcaagaacagatatagtatctatattttctggtgaaggagatacacaattaggtgtttttaaacctgatttattagctccaggtgaagatatagtatcttttttaccaggaggtacaagtggagcattaactggaactagcatggctacacctcatgttacaggggtttgttcattgtttatggaatggggaattgtaaatggaaatgatttatttttgtattcacagaaattaagggcattacttctaaagggagcaaggagattaagtaatcaatcttatccaaataattcatcaggatttggttttttaaatttatcagatatagatttgtacactctatctaatataaatcaagacttagaaacagaggat

SEQ ID NO: 87 - protein, 539 aa, Clostridium difficile
MIIINYELIVKYNGDILRLEEELGVSVEILNSSYAIITSSNEEDVNILLTYPEIEFIEKPFILQTQDVQSFSSTGITGFKNRTGLTGKGTIIGIIDSGIDYTLPVFRDSDGRSKILYYWDQSIQGNPPEGFREGTLYTNEDINNAIDGSMYIPISTTSLHGTHVAGICATIASDARIIVVRVGNIQTDIFSRSTEFMRAIKFILDRALELRMPVTLNISYGSNEGSHRGTSLFEQYIDDMCLFWKNNIVVAAGNNADKGGHKRIRLQNNITEEVEFIVGEGERILNINIWPDFVDDFSVHLVNPSNNQTQAISLTSGEIRNTLGETRITGYFYPIAPYSLTRRVTLQLSSNTQITPGLWKIVFEPIDIVTGNVNIYLPTSEGLNRNTRFLIPTQELTVTVPGTASRVITVGSFNSRTDIVSIFSGEGDTQLGVFKPDLLAPGEDIVSFLPGGTSGALTGTSMATPHVTGVCSLFMEWGIVNGNDLFLYSQKLRALLLKGARRLSNQSYPNNSSGFGFLNLSDIDLYTLSNINQDLETED

SEQ ID NO: 88 - DNA, 1776 bp, Clostridium difficile
ggatatagaagtattaataagtcatttaaagatgaggaaaatagttataagtttatagatggttataatatgcaaatacataatgacttagagaatgaaatttatataagtaaaaatgcaagtagacaatcaggaatactatcaggaatagatatagtccatactcctgaatttgaagaagaactagctgggttaggtatgagtcaaaggttttttaagataagtgattcattaggtgtactatctataaataatacagactatagtagtatacaacgagttttgcaacttccttcaatcataagaactgtatcgactacaaagatgacattacttggagaaattaatcgaggtacttttggaggtgtagttgcaacagaagaaatgggcgtaaatttctttaaaaataatcctaatattaatataacaggaagagggactctaatatcaattgcagatacaggaatagactatctacacccagattttatttatccagatggcacttcaaaaatagtatatttatgggaccaaacaaaagaaggaactcctcctgatggtttttatattgggacagaatatacacgagaagatataaatcgagctatcgcagaaaatgaccctagtctatctcaggatgaagttggtcaaggaactatgttgagtgggatatgtgcagggcttggaaatgtaaatagtgaatatgcaggtatagcagaagattctgagctaataataataaaactcggcaagatagatgatttttataatagtgcaatgttgtttgctgcatctcagtatgcatataaaaaagcttttgaacttggaagaccattagttataaatatgtctttaggtaccagtagcctagcaggtttaaccaataggagtaatagtgaaaaagcgttctttactagagggttatgtataacggcaggagcaggaaatgagggcaatacacagacacatacatctggaataataccatatgttggaggttctgttgaagttgaattagagttaaatgaagacgaggaagaattatcattagaactttggttaaatagaccagataaagctgatgtaataatagtatctcccactggtgaagaaagtaaaagtgttggaatttcaaattataataaagtaacaggtttatttgatttagaggggactgaatattctataacatatatatacccaacaactttttctggacagcaatttactaatgttactttaaagaatgcaaaaagaggtgtatggaagattcgattagtaggagtttatattataacaggaagatataacttataccttccaaatagagaacttttaaaaagtggaactagatttagagaggtagaccctttttacactataaattatcctgcgattcaagatgatttaataaccataggagcctacaatactattaatggtagtttatggcaaagttcatcaagagggccaactattgaagacaggttaaaaccagatatagtagcaccaggtgttaatataatagctgcttatcctgggaacacgtatgcaactataactggtacagcagcagcaagtgcacatgcagctggtgctgctgcaatgtattttcaatatacttttgttgacggtagatatccaaaccaagcatatgtgcaaaaaataaaaacttttatgcaagctggtgctagaaaagattcaaacacagtatatccaaatacaaattctggatatgggctcttggatgttagaggaatgtttgatgttttaaga

SEQ ID NO: 89 - protein, 592 aa, Clostridium difficile
GYRSINKSFKDEENSYKFIDGYNMQIHNDLENEIYISKNASRQSGILSGIDIVHTPEFEEELAGLGMSQRFFKISDSLGVLSINNTDYSSIQRVLQLPSIIRTVSTTKMTLLGEINRGTFGGVVATEEMGVNFFKNNPNINITGRGTLISIADTGIDYLHPDFIYPDGTSKIVYLWDQTKEGTPPDGFYIGTEYTREDINRAIAENDPSLSQDEVGQGTMLSGICAGLGNVNSEYAGIAEDSELIIIKLGKIDDFYNSAMLFAASQYAYKKAFELGRPLVINMSLGTSSLAGLTNRSNSEKAFFTRGLCITAGAGNEGNTQTHTSGIIPYVGGSVEVELELNEDEEELSLELWLNRPDKADVIIVSPTGEESKSVGISNYNKVTGLFDLEGTEYSITYIYPTTFSGQQFTNVTLKNAKRGVWKIRLVGVYIITGRYNLYLPNRELLKSGTRFREVDPFYTINYPAIQDDLITIGAYNTINGSLWQSSSRGPTIEDRLKPDIVAPGVNIIAAYPGNTYATITGTAAASAHAAGAAAMYFQYTFVDGRYPNQAYVQKIKTFMQAGARKDSNTVYPNTNSGYGLLDVRGMFDVLR

SEQ ID NO: 90 - DNA, 1089 bp, Clostridium difficile
atgaaattatctaagaagattcaagcattaatcttatttggtgtaatgggtacatctatattaacaggatgtagtagtaaaccaaaagaaaaagaagaagcaaaaactggaaaagatgattatacaataacagtaggttattataattgtgaccatatgactgcgggaccagtagcagaatcggcaggaatatataaagatttaggtcttaatgtaaaaactgttggaaatggtaaagttcctgaagctatggcagcaggaaaaatggatgcaggttacataggaactaaggggttagttggagcaatacctaagggttcgccaataacaatagcagctaacaaccatactggtggttctgaatatttaatagtttcaaaagatataaaagaacctaaagatttaataggtaaaaaaattgcaacagatatgagtgatttcttatggacaagtgattatggtccagaaacaggtctaccaactgacccatcaaaatatgaagttgtaaatatggattcagacaaagataaatatttagctcttaaaactgggaaaattcaagcttttacatcttgtgacccttggggttctgtagctgaaaatgacggtgcaggaaaaataatagcatctactcaatataaagaaaaagctaatggcaaagaatataactgttgttcattctcattaaacaaaaactttataaaagaacatccagatttagcaaaaaaattggttctagcacatacaaaagcaatagaatatatatatacaaatccagctgaagcagctaaaatatttgcaaaatattataatgtagaagaagaagttgcacttagaactatctataagaagactgttggagaaggtagaactcttacttggaaagttacaggtgaagaatataaaaataatttacaaatgtataaagatttaaaggctttagatgatatacctaaatatgaagatacgattgatacaagcttattggactcttgtggagctgatgattttgacaaatttataaaagaaaaagttaacccagagtttcctgaaggtatgagttatgaagactggaaagcaaaggtatta

SEQ ID NO: 91 - protein, 363 aa, Clostridium difficile
MKLSKKIQALILFGVMGTSILTGCSSKPKEKEEAKTGKDDYTITVGYYNCDHMTAGPVAESAGIYKDLGLNVKTVGNGKVPEAMAAGKMDAGYIGTKGLVGAIPKGSPITIAANNHTGGSEYLIVSKDIKEPKDLIGKKIATDMSDFLWTSDYGPETGLPTDPSKYEVVNMDSDKDKYLALKTGKIQAFTSCDPWGSVAENDGAGKIIASTQYKEKANGKEYNCCSFSLNKNFIKEHPDLAKKLVLAHTKAIEYIYTNPAEAAKIFAKYYNVEEEVALRTIYKKTVGEGRTLTWKVTGEEYKNNLQMYKDLKALDDIPKYEDTIDTSLLDSCGADDFDKFIKEKVNPEFPEGMSYEDWKAKVL

SEQ ID NO: 92 - DNA, 1272 bp, Clostridium difficile
atgattaaactaaaaaaggttctttctttagttatggtagggattctatcagtatcaattcttgcaggatgttcaaaaaaagaagattctaaaggcaaagagggtaaagaaaaattagttgtatggtctgcaccattaacagaccatgatgcagatgcatggaagccgatatttgaaaaatttgaaaaagaaaataactgtgaaattgaatttcagatagtaccatgggataactacgcagaaaaatatgcaacagcaataagtgcaggtgaaggtccagatataggatacatgtatgcagagatgtttcctcaatttatagaaatgggtgcggtagaagatttaacaccttatttagaaaaatcaggaacttcagataattatctatacttagatgatgcaaaaatgatgggtggtatttatggtttacctatagaagctgctaatccaggcgtattgtactacaataaagatatactagaaaaattaggagaaaaacctccaaaaacatgggatgattttaaaagaatctgtgaaaaagcaacaaaagatactgatggagatggaaaaatcgaccagtggggtcttgcacaaggttggggttctaaagtatttggaagcttaaactggaactggtatccgtatttatggcaagctggtggagatatatataatgatgatttaaaatcagttaaatttaataatgcagaaggcttgaaagctgcaaactttataaatgatatgaaaaagtatattccagaagatgctttatcaaaagatagtaatgaaatgattgaaagtgtatttggaccaggaaaagctgcatttactataatgctatcctctgctgctacaagtacttttgataaatcattcccggatttaaactggggatatgtaacatcattagaagataagacagttggaagttttgcttcagtagatgatttaacattaatgtcagcatgtaaaaataaagaacttggatttaaacttcttgagtatatgctaagcaaagaatcaatggaagctttccacaaagaaatacctagagctccagttgctaaaggtgaaaaataccaaggagacccaagatttgaagaaatggtgacaagagataaacatatgtatagaccattgacagttggacctcatggagtagagatatatgaatatttatggaaacaacttcaaatgatgatagctggagacataactccagaacaagcactaaatgaatctgcaaaatatgcaaatggattactagcacaa

SEQ ID NO: 93 - protein, 424 aa, Clostridium difficile
MIKLKKVLSLVMVGILSVSILAGCSKKEDSKGKEGKEKLVVWSAPLTDHDADAWKPIFEKFEKENNCEIEFQIVPWDNYAEKYATAISAGEGPDIGYMYAEMFPQFIEMGAVEDLTPYLEKSGTSDNYLYLDDAKMMGGIYGLPIEAANPGVLYYNKDILEKLGEKPPKTWDDFKRICEKATKDTDGDGKIDQWGLAQGWGSKVFGSLNWNWYPYLWQAGGDIYNDDLKSVKFNNAEGLKAANFINDMKKYIPEDALSKDSNEMIESVFGPGKAAFTIMLSSAATSTFDKSFPDLNWGYVTSLEDKTVGSFASVDDLTLMSACKNKELGFKLLEYMLSKESMEAFHKEIPRAPVAKGEKYQGDPRFEEMVTRDKHMYRPLTVGPHGVEIYEYLWKQLQMMIAGDITPEQALNESAKYANGLLAQ

SEQ ID NO: 94 - DNA, 1053 bp, Clostridium difficile
atgattaaaaaaatttctactatattatcgttagttttgttaatctctatttctagtacgataggagtatttgcagatgcaaatcccaaaagagagttgatagaagggagtataccagagatttcgacagaattaaataaaagagcatttaaggattctaaagaagtaattcttgtaaatgaagagtcaattgtagatagtataagtgcaacacctttagcatattcaaaaaatgctccaatagttgtaactaagagtaaaaatcttggtagagtaacaagaaattatctaaaagaactaggtccagagaaggttacgatagtaggtggtttaaaggcagtatctaaagatgctgaacgtaatatagaaaaaatgggaatgaaagtagaaagaataagagggaaagacagatatgatacatctttaaagatagctagagaaatgtatagaacagtaggatttgatgaagcatttttacttagctcaacaacaggattagagaacgccatatctgtatattcttatgccgctaaaagtggaatgccaataatatgggctaaagatgaagggtttgaggaacaaattgatttcttaaaaggcaagaatcttaaaaaaatatatgcattaggtgattcaaaagaatttattgcagagattgattctaacttaaaaaatatagaaggaataaagcaaataaataagtcaagtacaaatgttgatttaataaagaagttttatgatgaaaaagatataaagaaaatctatactgctagattagactttggtagtagatctgatgtaaacgaatatatttctttgggagtagtatcagcaaaagaaaatatgccaatactgatttgtagtgataacttaagtcgtgcacaagataaattcttgaaagatagcaatataaatgatgtagttgaagttgggtatacagtaggtgattatagtctatttaagagcatatttaatctaacattcttatcttgtatagtattaatactattattactattgattacatttagggcacttagatatgagtcgaaa

SEQ ID NO: 95 - protein, 351 aa, Clostridium difficile
MIKKISTILSLVLLISISSTIGVFADANPKRELIEGSIPEISTELNKRAFKDSKEVILVNEESIVDSISATPLAYSKNAPIVVTKSKNLGRVTRNYLKELGPEKVTIVGGLKAVSKDAERNIEKMGMKVERIRGKDRYDTSLKIAREMYRTVGFDEAFLLSSTTGLENAISVYSYAAKSGMPIIWAKDEGFEEQIDFLKGKNLKKIYALGDSKEFIAEIDSNLKNIEGIKQINKSSTNVDLIKKFYDEKDIKKIYTARLDFGSRSDVNEYISLGVVSAKENMPILICSDNLSRAQDKFLKDSNINDVVEVGYTVGDYSLFKSIFNLTFLSCIVLILLLLLITFRALRYESK

SEQ ID NO: 96 - DNA, 1641 bp, Clostridium difficile
ttaccgagtacacccgttcatgcagaaagtaagcaatactggacggaaagtgcagagcgagtcggtatcattgaaaaagtaatgaatgacggttctatcggttctacattcaatgagggcatgatgaaagttgagggcgaaactgcctattgtattgacatcaatactgactttaagaatggttacaagaccagagctgacgcaagctcacgcatgagtgccgaccagatttcagatgtggcgttatccttagagtatgtcaaacagtatggcgaagctcacaaggaattgaactacaaacaagtctatctgttggaacaatgtgttgtctggcagagattaagcgtacatcttggctggcaatgcgacaacgtgcgagcttcttatgatgaaattccaaaggcaacgcaggacgaagtttttgctggtgcaaaagcctttgtcaaagaaaataaaggacgctatgaatgtggcggttatatctactctggcgaggggcaggaattgggacaattctgggcgaagctgaatgttggaaatgcaaaactgcaaaaaacctccagtaataccagcattacagacggtaacgggaattactctatcgctggtgcaacctacggtgtcttttctgataaggactgcacaaaacagcttgccacccttacgactgataaaaacggaaatacagatgttatagaggtaaaagctggcacagtctatatcaaggaattatctgcaccagcaggatataaagtggataaaacaatctatccattgacaatcaaagctggcgaaacagcgaccttgaaagtatcagatacgccaaaagtaacagacactttagttgagcttttcaagattgacatggaaacacagaaagacaatccgcaggggaacgcttctctagcaggtgcggaatttacatggaaatattatgctggcttctacaataaagacaatcttcctgccgaagctactcgtacatgggttacaaagacaatcgctgaaacagacagcgacgggacaacccactacatcacaaaattagcggacgcatacaaggtatctggcgacagcttctatatgcaggacggaaaagccgttcttcctttaggaacattaaccgttgaggaaacgaaagctccaaacggctacttgttagacggtgcatatatgcaggctggcgacaagtccgaacagattaagggcttatatcttacacagattaccgaggacggcgaccttgccgtattgactggaagtaaccagttttctgtatcagataaggttatccgtggcggtgtgaaaattcagaaacgagatttagaaacgggtgacacaaagccacaaggaagtgccacattgaaagatactgcctttgacatcatttccttaaatgataatgcggtattggttgagggcaagctatacaagaaaaatgaagtcgtaaaaaccattcatacagaccttgagggtgtggcttctacttctgccgaccttttaccttatggaaaattccgtatcgttgagagtgaagctcccgacggatatttgacagacggtgcgaagccgattgactttgcaatcacagaaaacggaaaaatcgtggacttaaccgatgaagcccattctatctacaat

SEQ ID NO: 97 - protein, 547 aa, Clostridium difficile
LPSTPVHAESKQYWTESAERVGIIEKVMNDGSIGSTFNEGMMKVEGETAYCIDINTDFKNGYKTRADASSRMSADQISDVALSLEYVKQYGEAHKELNYKQVYLLEQCVVWQRLSVHLGWQCDNVRASYDEIPKATQDEVFAGAKAFVKENKGRYECGGYIYSGEGQELGQFWAKLNVGNAKLQKTSSNTSITDGNGNYSIAGATYGVFSDKDCTKQLATLTTDKNGNTDVIEVKAGTVYIKELSAPAGYKVDKTIYPLTIKAGETATLKVSDTPKVTDTLVELFKIDMETQKDNPQGNASLAGAEFTWKYYAGFYNKDNLPAEATRTWVTKTIAETDSDGTTHYITKLADAYKVSGDSFYMQDGKAVLPLGTLTVEETKAPNGYLLDGAYMQAGDKSEQIKGLYLTQITEDGDLAVLTGSNQFSVSDKVIRGGVKIQKRDLETGDTKPQGSATLKDTAFDIISLNDNAVLVEGKLYKKNEVVKTIHTDLEGVASTSADLLPYGKFRIVESEAPDGYLTDGAKPIDFAITENGKIVDLTDEAHSIYN

SEQ ID NO: 98 - DNA, 1248 bp, Clostridium difficile
gatgaagcccattctatctacaatcagattaagcgtggagatattgagggcgtgaaaatcggtgcaggcacacacaagcgtcttgctgatgttccttttaggatcacaagtaagacgactggggaaagtcatgttgtggtaactgatgataacgggcaattttccacttctgctgactgggcttctcacaagcacaataccaacgcaggaaagaccagcgaggacggtgtatggtttggagcttctgaaccagacgacagcaagggtgcattgccttacgatgcttacatcattgaagaattgaaatgtgaaagcaacaaaggctttgaacttatcccgccttttgaaatcgtagtatcaagaaataaccttgtgattgatttagggactttgactgatgaatacgaaaaagaaatctctatccataccacagcgaccagcaaagacggcgaaaagactatccttgcaggaaaagaggtaacaatcgttgatacagtcaaattggacggacttacaaaaggtacaaaataccagttaaaaggctggcagatgttaaaggaagaaaacgccgagctaatcattgacgggaaacgtgtggaaaacgactatacctttatcgctgatgaggaagaaatgaaagtggaaatttcctatacatttaatgcgtctgctttaggtggcaagaaccttgttacctttgaagaattgtatgatttaagcaatccagacgaacccgtgaaagttgcggaacacaaggacattgaggacgacgggcagacggtacttatcacagagcgtatcatcaaaattcatacaactgctaccgacaaggacggcaacaaagagcttgaagcaggaaaagacgttacaatcattgataccgtaaccttagagggcttagaagtcggaacacagtacaaacttgtgggctggcagatgttgaaagaagaaaatgcagagcttcttgtcaatggaaaacgtgtggaaagtgattacacctttatcgctgacagcgaaaatatgaaagtggaagttgcctttacttttgacgctacctcccttgacggcaaacagcttgtaacttttgaagaattgtacgacttaagcaatacagacgagccgaagaaagttactgaacataaggacattgaggacgagggacagacgattacctttaaggaaaaaccagaagttccagagaagcccgaacagccacagacaccagaaaagcctagcagacctagcgac

SEQ ID NO: 99 - protein, 416 aa, Clostridium difficile
DEAHSIYNQIKRGDIEGVKIGAGTHKRLADVPFRITSKTTGESHVVVTDDNGQFSTSADWASHKHNTNAGKTSEDGVWFGASEPDDSKGALPYDAYIIEELKCESNKGFELIPPFEIVVSRNNLVIDLGTLTDEYEKEISIHTTATSKDGEKTILAGKEVTIVDTVKLDGLTKGTKYQLKGWQMLKEENAELIIDGKRVENDYTFIADEEEMKVEISYTFNASALGGKNLVTFEELYDLSNPDEPVKVAEHKDIEDDGQTVLITERIIKIHTTATDKDGNKELEAGKDVTIIDTVTLEGLEVGTQYKLVGWQMLKEENAELLVNGKRVESDYTFIADSENMKVEVAFTFDATSLDGKQLVTFEELYDLSNTDEPKKVTEHKDIEDEGQTITFKEKPEVPEKPEQPQTPEKPSRPSD

SEQ ID NO: 100 - DNA, 1413 bp, Clostridium difficile
caaactgtggcaacaaatttaacagggcaagaaagatatgaaactgctgttaaaataagtcaagatggatggaaaaatgctgatgaggtagtaatcgtaaacgactcatctatagcagatgctctatctgcaacaccatttgcaaaagcaaaaaatgctccaatacttttaacaagtaaagataaattaaatgataagacgaaagcagaaatacaaagattaaaagctaaaaaagtatacttaataggtggaacttctgtattaagtacaaatatagaaaaagaaataaaagatttaaaaatatcttttgagagaatctctggagctgagagatatcaaacatccttagaattagcaaagaaattagatgctataagtgatgttaagaaaatagctgtagttaatggtgaaaaaggacttgcagatgctgtaagtgtaggagcaccagctgcacaaaacaatatgccagtaatacttgctgattctaaaaatggaacagcagttgcagacaaatttataaaggatgctggaataactcaatcttatgtagtaggtggagagagttcaatttctgaagctgttaaaaataaactaccaaatagtacaagactaggtggaacagatagaaatgatacaaatgcaaaagtaataaaagaattttataaaaagacagatttaaaaaatgcttatgtaactaaagatggtatgaataaacaagaccaacttatagatgcactagcagtaggtgtattaggtgctaaaaatcaatcaccagtagttttagttggaaagaacttatcagcttcacaaaaatctctagttaactctaagagttttgataagataactaaagttggtgggaatggtaatgagacagcatttaatgaaatgaagtcattacaagaagtaaaaacagttgaagccaaaacaatttctgaattaaaatcagctatagataaagctactgctaatgatgttataaacttcaaaccaactagtgaggttaaagaagcatttacaatacaaactgataaagcagtaacagtaaacttaaatggtacatatacaaagactgtgactatcaacatgcctaatggtgatgtaaataactatgcaaaagtggatgatgtagttatagatgatgtaaaagatggaacttttgttaactatggaaaaataactaacttaaaggttaatgataaaaatggagccaagatagaaaataattctaaaggtgagattggtagtttaacagtagcatctggagcaagtcaagtaaaagtgactaatggtggtaagataactacagttacaaataattctaaagggactactatagataataaaggtacaataagtagtgttaagggagataattctccaacaataagtggaaatagtccaagttctaac

SEQ ID NO: 101 - protein, 471 aa, Clostridium difficile
QTVATNLTGQERYETAVKISQDGWKNADEVVIVNDSSIADALSATPFAKAKNAPILLTSKDKLNDKTKAEIQRLKAKKVYLIGGTSVLSTNIEKEIKDLKISFERISGAERYQTSLELAKKLDAISDVKKIAVVNGEKGLADAVSVGAPAAQNNMPVILADSKNGTAVADKFIKDAGITQSYVVGGESSISEAVKNKLPNSTRLGGTDRNDTNAKVIKEFYKKTDLKNAYVTKDGMNKQDQLIDALAVGVLGAKNQSPVVLVGKNLSASQKSLVNSKSFDKITKVGGNGNETAFNEMKSLQEVKTVEAKTISELKSAIDKATANDVINFKPTSEVKEAFTIQTDKAVTVNLNGTYTKTVTINMPNGDVNNYAKVDDVVIDDVKDGTFVNYGKITNLKVNDKNGAKIENNSKGEIGSLTVASGASQVKVTNGGKITTVTNNSKGTTIDNKGTISSVKGDNSPTISGNSPSSN

SEQ ID NO: 102 - DNA, 3306 bp, Clostridium difficile
aaggtaggtcaaataaaatttagtgcaacagataaacaaataaaaatggcatcaggagataagacagtagatccatcagataacacatatatactaaaattaacaaatgggacagtaaaagatggagatgtaaaagctaatgttaaagtagcaggattaccatcaggactagattatacagcagtaggaaatagatcagcaaatacaataacaattacagtatcaggaacagcaagccaatcaatacaaaatgatttaaataatgtaagtgtgctagttaaagcaggagcagtatctggaacaggagctacagattcaattgcaaatacaacatttgaaattaaaaaatatgtggcgccagcaataggtcaattaacttttgatgcaacagataaacaaataaaaatggcatcaggagataagacagtagatccatcagatgacacatatgtactaacattaacaaaaggaacagcaaaagatggagatgtaaaggctaatgttgaagtaacaggattaccatcagggttagattatacagcagaaggagattcatcaacaaatacaataacaataacagtatcaagaacagcaagccaagcagtacaaactgatttagataatgtaagtgtgttagttaaagcaggagcagtatctgaaacaactgccacagattcagcagcaaatgcaacatttgaagttaaaaaatatgtggcagcgccagcagtaggtcaattaacttttgatgcaacagataaacaaataaaaatggcatcaggagataagacagtagacccatcagatgacacatatgtactaacattaacaaaaggaacagcaaaagatggagatataaaggctaatgttgaagtaacaggattaccatcagggttagattatacagcagaaggagattcatcagcaaatacaataacaataacagtatcaggaacagcaagccaagcagtacaaactgatttagataatgtaagtgtgctagttaaagcaggagcagtatctgaaacaactgctacagattcagcagcaaatgcaacatttgaagttaaaaaatatgtggcagcgccagcagtaggtcaattaacttttgatgcaacagataaacaaataaaaatggcatcaggagataagacagtagatccatcagatgacacatatgtactaacattaacaaaaggaacagcaaaagatggagatgtaaaggctaatgttgaagtaacaggattaccatcagggttagattatacagcagaaggagattcatcagcaaatacaataacaataacagtatcaggaacagcaagccaagcagtacaaactgatttagataatgtaagtgtgttagttaaagcaggagcagtatctgaaacaactgctacagattcagcagcaaatgcaacatttgaagttaaaaaatatgtggcaccagcaataggtcaattaacttttgatgcaacagataaacaaataaaaatggcatcaggagataagacagtagacccatcagatgacacatatgtactaacattaacaaaaggaacagcaaaagatggagatgtaaaggctaatgttgaagtaacaggattaccatcagggttagattatacagcagagggagattcatcagcaaatacaataacaataacagtatcaggaacagcaagccaagcagtacaaactgatttagataatgtaagtgtgctagttaaagcaggagcagtatctgaaacaactgccacagattcagcagcaaatgcaacatttgaagttaaaaaatatgtggcaccagcaataggtcaattaacttttgatgcaacagataaacaaataaaaatggcatcaggagataagacagtagacccatcagatgacacatatgtactaacattaacaaaaggaacagcaaaagatggagatgtaaaggctaatgttgaagtaacaggattaccatcagggttagattatacagcagagggagattcatcagcaaatacaataacaataacagtatcaggaacagcaagccaagcagtacaaactgatttagataatgtaagtgtgctagttaaagcaggagcagtatctgaaacaactgccacagattcagcagcaaatgcaacatttgaagttaaaaaatatgtggcaccagcaataggtcaattaacttttgatgcaacagataaacaaataaaaatggcatcaggagataagacagtagacccatcagatgacacatatgtactaacattaacaaaaggaacagcaaaagatggagatgtaaaggctaatgttgaagtaacaggattaccatcagggttagattatacagcagagggagattcatcagcaaatacaataacaataacagtatcaggaacagcaagccaagcagtacaaactgatttagataatgtaagtgtgctagttaaagcaggagcagtatctgaaacaactgccacagattcagcagcaaatgcaacatttgaagttaaaaaatatgtggcaccagcaataggtcaattaacttttgatgcaacagataaacaaataaaaatggcatcaggagataagacagtagacccatcagatgacacatatgtactaacattaacaaaaggaacagcaaaagatggagatgtaaaggctaatgttgaagtaataggattaccatcagggttagattatacagcagaaggagattcatcagcaaatacaataacaataacagtatcaggaacagcaagccaagcagtacaaactgatttagataatgtaagtgtgctagttaaagcaggagcagtatctgaaacaactgctacagattcagcagcaaatgcaacatttgaagttaaaaaatatgtggcaccagcaataggtcaattaacttttgatgcaacagataaacaaataaaaatggcatcaggagataagacagtagacccatcagatgacacatatgtactaacattaacaaaaggaacagcaaaagatggagatgtaaaggctaatgttgaagtaataggattaccatcagggttagattatacagcagaaggagattcatcagcaaatacaataacaataacagtatcaggaacagcaagccaagcagtacaaactgatttagataatataagtgtgttagttaaagcaggagcagtatctgaaacaactgctacagattcagcagcaaatgcaacatttgaagttaaaaaacatgcgtcagatccaatatcaacaataggaaaaatatcttctgggctatcaagtttatttaatatattaaaa

SEQ ID NO: 103 - protein, 1102 aa, Clostridium difficile
KVGQIKFSATDKQIKMASGDKTVDPSDNTYILKLTNGTVKDGDVKANVKVAGLPSGLDYTAVGNRSANTITITVSGTASQSIQNDLNNVSVLVKAGAVSGTGATDSIANTTFEIKKYVAPAIGQLTFDATDKQIKMASGDKTVDPSDDTYVLTLTKGTAKDGDVKANVEVTGLPSGLDYTAEGDSSTNTITITVSRTASQAVQTDLDNVSVLVKAGAVSETTATDSAANATFEVKKYVAAPAVGQLTFDATDKQIKMASGDKTVDPSDDTYVLTLTKGTAKDGDIKANVEVTGLPSGLDYTAEGDSSANTITITVSGTASQAVQTDLDNVSVLVKAGAVSETTATDSAANATFEVKKYVAAPAVGQLTFDATDKQIKMASGDKTVDPSDDTYVLTLTKGTAKDGDVKANVEVTGLPSGLDYTAEGDSSANTITITVSGTASQAVQTDLDNVSVLVKAGAVSETTATDSAANATFEVKKYVAPAIGQLTFDATDKQIKMASGDKTVDPSDDTYVLTLTKGTAKDGDVKANVEVTGLPSGLDYTAEGDSSANTITITVSGTASQAVQTDLDNVSVLVKAGAVSETTATDSAANATFEVKKYVAPAIGQLTFDATDKQIKMASGDKTVDPSDDTYVLTLTKGTAKDGDVKANVEVTGLPSGLDYTAEGDSSANTITITVSGTASQAVQTDLDNVSVLVKAGAVSETTATDSAANATFEVKKYVAPAIGQLTFDATDKQIKMASGDKTVDPSDDTYVLTLTKGTAKDGDVKANVEVTGLPSGLDYTAEGDSSANTITITVSGTASQAVQTDLDNVSVLVKAGAVSETTATDSAANATFEVKKYVAPAIGQLTFDATDKQIKMASGDKTVDPSDDTYVLTLTKGTAKDGDVKANVEVIGLPSGLDYTAEGDSSANTITITVSGTASQAVQTDLDNVSVLVKAGAVSETTATDSAANATFEVKKYVAPAIGQLTFDATDKQIKMASGDKTVDPSDDTYVLTLTKGTAKDGDVKANVEVIGLPSGLDYTAEGDSSANTITITVSGTASQAVQTDLDNISVLVKAGAVSETTATDSAANATFEVKKHASDPISTIGKISSGLSSLFNILK

SEQ ID NO: 104 - DNA, 2037 bp, Clostridium difficile
atgttaagtaaggagattaatatgagaagaaatacaaaattattaacaacaggaattctttcaatggcaatcgtcacacctacaatggcatttgctactgaatctaatgctatggaaaataacgctgatttaaatataaacttagagaaaaaaagtatcgttttaggtagtacctcaaaagtcagtgttaagtttaaagaaaaaccagatgcagatagcattacattaaagtataaatgctatgatatgccattggatacaactttaaactacaatcaatcaactgagtcatatgaaggaactatcaattataataaagacccagaatatctaaatgtttgggaactacaagggataacaataaacagcaaaaataatcctaaaactttaaacaaacaagaactagaaaagatgggattaaatttaaaagactataatgtaacacaggaatgtataattgaagatataacttctagaaaagatgtaaataaatatttaagaaaaacttctgcacctattacagaacttacaggaagtgatagatacgaaacagcagttaaaataagtaaagaaggctggaaaaatggttcagataaggtagttataataaatggggatgtaagtatagatggcattatatcaactccactagcaactacatataatgctccaatacttttggttgaaaaaaacaatgtacctaatagtgtaaaatcagaattaaagcgtttaaatcctagagatgtaattataattggagatgagaatgctatttctaaaactactgctaatcaaattaaatcgactgtaaatgctagtcaaacacgtctaaagggctctaatagatatgagacatctttattgatagcaaaggaaatagataaaaatcatgatgtggaaaaagtatacataacaaatgctaatggcggagaagtggatgcacttactatagcagcaaaagcaggtcaagacaagcaaccaattatattaactgataaaaatagtattacagacaatacatataaatggttaaagagtgaggatttacaaaatgcttattttataggtggccctcaaatgatatcaacaaatgttataaataaggtaaatgatataactaaagataatgttactaataatagagtatatggagcagatagacacgaaacaaatgcaaacgtaataaaaaaattctatacagatgatgagttagaggctgttttagtagctaaatcagatgtacttgttgatgctttagcagcaggtccattggctgcgaacttaaaatctccaatacttataacaccaaagacatatgtatctgcataccataaagaaaacttagaagctaaatcggcaaataaggtatataaaataggtggaggattgacttctaaggtaatgagctctatagcatcatcattatctaaacacaatacgactccaacagaaccaggaaatagtgggggcaagacagttatgattgacccaggacatggtggttcggacactggaacaacaggtaaaccattagggggtattagagaaaaagactatacattaaatacttcacttgcgacaactgaatatttacgttcaaagggattcaatgtaataatgacaagagacacagataagactttatctcttggaaatagaactgctttatctaactctttgagaccagatttatttacgagtatacactataatgcatctgatacaactgggaatggtgtagaagtattttataagcttaaagataaagatggaggaactactaagactgtagctacaaatatattaaatagaattttagagaaatttaatctaaaaaatagaggtgcaaaaacaagaacactatcaactgaccctacaaaagattatttatatgttttaagaaataatgatatgccagctgtacttgtagaatgtgcatttttggataatgagaaagatatgagtttacttaatacatcaaataaagtaaaagaaatgggtacacaaataggtaaaggcatagaagattcattaaaa

SEQ ID NO: 105 - protein, 679 aa, Clostridium difficile
MLSKEINMRRNTKLLTTGILSMAIVTPTMAFATESNAMENNADLNINLEKKSIVLGSTSKVSVKFKEKPDADSITLKYKCYDMPLDTTLNYNQSTESYEGTINYNKDPEYLNVWELQGITINSKNNPKTLNKQELEKMGLNLKDYNVTQECIIEDITSRKDVNKYLRKTSAPITELTGSDRYETAVKISKEGWKNGSDKVVIINGDVSIDGIISTPLATTYNAPILLVEKNNVPNSVKSELKRLNPRDVIIIGDENAISKTTANQIKSTVNASQTRLKGSNRYETSLLIAKEIDKNHDVEKVYITNANGGEVDALTIAAKAGQDKQPIILTDKNSITDNTYKWLKSEDLQNAYFIGGPQMISTNVINKVNDITKDNVTNNRVYGADRHETNANVIKKFYTDDELEAVLVAKSDVLVDALAAGPLAANLKSPILITPKTYVSAYHKENLEAKSANKVYKIGGGLTSKVMSSIASSLSKHNTTPTEPGNSGGKTVMIDPGHGGSDTGTTGKPLGGIREKDYTLNTSLATTEYLRSKGFNVIMTRDTDKTLSLGNRTALSNSLRPDLFTSIHYNASDTTGNGVEVFYKLKDKDGGTTKTVATNILNRILEKFNLKNRGAKTRTLSTDPTKDYLYVLRNNDMPAVLVECAFLDNEKDMSLLNTSNKVKEMGTQIGKGIEDSLK

SEQ ID NO: 106 - DNA, 1713 bp, Clostridium difficile
atgaagagaataaaagtcttaacagtcgttttagctataacttttatggtagctggttgtagtaatactaaaacaaaacaaagtagtagtgattcaagtttacaaagtcaaagttcgatagatgctaagtatataaacttaacaatggtaactccaaaaactataaatcctataactaatactgataagtctgttggttatataatgaatttagtttatgatagtttatttactatagatgagaactacaatgtaattcctcaattagttaaggagtataatatagctcaggatggaatgagtatagatataaagctaaaagatgcaaagtggcatgatggaaaaaatgttacttcaaatgatgtaaactatactattggtttaattcaaaaaagtgcagatagtccatataatgaatttactaaaaatatagcttctgtgaatattaaatcagataaagattttacaataaaatttaaagctagatatgctttttcaattgatagtttaatttttccaattgtatctcaaaatcatttagattcaaaagatgtaaatgacaagaataataatatgataggaaatgggaaatataaaatagaatcatatacagaaagagaaggaatggttttatctgtaaacaaagattactatgaagaagttccaaaaaccatgaagaacataaaagtaggtatggtgcctaatgaagatgcaaggacatctatggttatggctcttgatagtgatataaccaatgttacattaaatgatttaagtaagtttcaagaaaaagagtttaatataacaaaatatcaaggaagagattatgagtgtgtattatttaattataataatccttttttcaaagatgttaattttagaaaagcaattgcacactctatagataaagatagaattattagtgaaggttatatggatgatgctactccagttaattttccacttaattcaaaatcaaaatactataatagtgaaatgaaggatttagagtttaataaagataaggcgatagagtgtcttgctaaggtagaatatgcaaatgtaaactcagtaaatcaaaatgacaataaagtaaaaaatcagaaaaaatcagctaaaaagaactcaaagaagcttacgccagaagaagaagcaaaagctaaaaaagcagaagaagatagaatcaaaaaagaagctgaagagaaaaaaaatagagaaaaagaggaagtaaagaaaagtctttctgaaatgaacttaaagataatagtaaacagagataatagtgagagaataaaaactgcaaacataataaatgaaaacttaaaagctataggaataaatagtacagtaaatcagctgtcagataaggatatggaaaatgctcttaattctaaaaattatgatttagcattagttggatggaaactatcaattataccagatgcaagtagtattatagcgagtagtggatatactgatgataagttaaatggatatatgtctgcacttacaagttctacgtctgaaattgaaacaaaaaaagcatacaaagatgtacagacatatataaaagataatgcaacatttataagtttagctgtgagaaacaactatattgtaagtaatagtagattaaaaggtaaaattactccaaatgattttgatgtatatgagggaatatctaatttagatataaaatcgaatgaatcaaat

SEQ ID NO: 107 - protein, 571 aa, Clostridium difficile
MKRIKVLTVVLAITFMVAGCSNTKTKQSSSDSSLQSQSSIDAKYINLTMVTPKTINPITNTDKSVGYIMNLVYDSLFTIDENYNVIPQLVKEYNIAQDGMSIDIKLKDAKWHDGKNVTSNDVNYTIGLIQKSADSPYNEFTKNIASVNIKSDKDFTIKFKARYAFSIDSLIFPIVSQNHLDSKDVNDKNNNMIGNGKYKIESYTEREGMVLSVNKDYYEEVPKTMKNIKVGMVPNEDARTSMVMALDSDITNVTLNDLSKFQEKEFNITKYQGRDYECVLFNYNNPFFKDVNFRKAIAHSIDKDRIISEGYMDDATPVNFPLNSKSKYYNSEMKDLEFNKDKAIECLAKVEYANVNSVNQNDNKVKNQKKSAKKNSKKLTPEEEAKAKKAEEDRIKKEAEEKKNREKEEVKKSLSEMNLKIIVNRDNSERIKTANIINENLKAIGINSTVNQLSDKDMENALNSKNYDLALVGWKLSIIPDASSIIASSGYTDDKLNGYMSALTSSTSEIETKKAYKDVQTYIKDNATFISLAVRNNYIVSNSRLKGKITPNDFDVYEGISNLDIKSNESN

SEQ ID NO: 108 - DNA, 1368 bp, Clostridium difficile
gtgaaattaaagaaattattatcactagggttagtgtcaatgtttgttgctggttttcctatatcagctaatgcacttgaaacaatttatactattcaaggaaaagataaatacgaaacggctgctcttatagctgatgaacaaaattatactacagctatattaattaatgcagacagcacaatggctgatggattaagtgcgagtggacttgcaggagcaacaaatgcaccaatttttttaactaagaaaaataacatacctaatgcaactcttaaaagagtagagaaagctaaaaaggtatacataataggtggagaaagttctattgataaagcaacagaaactcttctaaaagataaaggaatagaggctaaaagacttcaaggtagtgatagaattaagacaagctataatgttgcaaaagaaataaactcaattaacaaagtaaataaagttatattgactaatgcttttaaaggagagcctgatgcaatgagtgctgcacctgtagcagttagagataaagcagctatagtattaactgatggaaaaagtgttccatttaatacaactggtgtagaaagttatgtaataggtggtacttcatcaatgagtgacaaactagttaatgatactaattcaactagattaggtggagtagatagatatgatactaataaaaaaatagtaaataagttctataatggcgcaaaagaattttatatagctagtggtactgatttagtttatgctttagttgcttcaccaatggctaaaaataatcctattgtactagttgatattggaagtaataaagatatacttaaaaatgctgcaaaagtgactgggataggaaatctaagtgataaaattatgctagagtgtgaaaataccatcaataatattagtcttccatcttcaaataaaaatataatatgtggattaaagattgattttgattcaaatcacataatttggcaagataaaggaagttatcttgaatgttatgatgataaccttgaatattatactgaaaaatataaagacccaacagttcctataaatatagaaaatacaagtacgcaaaatttagatgtaacaaaattaaaagtttatggagaagctaattcaacattatatatggggcaatacgctaaaataaaaatggattttaatagttttggtgtattaaagccaggagaaaaatgtactatttatttagatataatttcattagatccatcaagaagcatgacattaacattttcttatgtaggtgataaagaaaattataaatatgaacaaggattggtaagtagaatattattttataacccagatggagaagatttttttgaatataaa

SEQ ID NO: 109 - protein, 456 aa, Clostridium difficile
MKLKKLLSLGLVSMFVAGFPISANALETIYTIQGKDKYETAALIADEQNYTTAILINADSTMADGLSASGLAGATNAPIFLTKKNNIPNATLKRVEKAKKVYIIGGESSIDKATETLLKDKGIEAKRLQGSDRIKTSYNVAKEINSINKVNKVILTNAFKGEPDAMSAAPVAVRDKAAIVLTDGKSVPFNTTGVESYVIGGTSSMSDKLVNDTNSTRLGGVDRYDTNKKIVNKFYNGAKEFYIASGTDLVYALVASPMAKNNPIVLVDIGSNKDILKNAAKVTGIGNLSDKIMLECENTINNISLPSSNKNIICGLKIDFDSNHIIWQDKGSYLECYDDNLEYYTEKYKDPTVPINIENTSTQNLDVTKLKVYGEANSTLYMGQYAKIKMDFNSFGVLKPGEKCTIYLDIISLDPSRSMTLTFSYVGDKENYKYEQGLVSRILFYNPDGEDFFEYK

SEQ ID NO: 110 - DNA, 1347 bp, Clostridium difficile
tcagaattaggagagaatagtcagattcaaagtggttcaactaattcatcaactggagaggagaaggaaagcgacaataaaaagccagaacagactccagagaaagataaggcaacagataataaaaaaccagaacagaccccagaggaagaaaaaccaacagataataaaaaaccagaacagaccccagaagaagataagtcaacagataataaaaagccagagcaaactccagaaggagaaaagccaatagataataaaaagccagagcagataccagaagaagataagtcaacagataataaaaagtcagaacaagctttagaagatgaaaaaccactagacaataaaaatacagaaaaaactccagaggaagataatctattagaagatgaaaatttattgaaagttttagaagaagaacttaatgaagaaaatgaagactatggatttgttgtaaaaattaataacaatacaatagaaacggaatcaatgaaaaaaatatcatttaatttaacttatactccaacatcaaaaggaatacaagcaggagattcaataacttttaaggtgccagatgtattcaataaagttaatttagattatacaagtgaatgctttgataaaacagaaagtaatggagagtatacacttacatttagagaattacctaatggccaaagtgtaatgcaaggtaaaataggtttggaagcatatgttaaaaaggttgatgaagatactaatgcaaaaatacatattgaaactactggaaaaatagaaagtggaagtggagatatagatgtagaaataaaacctggagataaaacggatgttccagatgctaaaggaacacttaaaaagcttgttgaaggaaaaaaatcaactactgtatttatgccagttaaaaataaagatataaattacagtatacaagtaaatgaaaagcaggaagagttaaaagatattattttgtatgatgagcttcctgaaggattgacattgataaatggttctgtaagtgtagtaacaagtgatggaaaagaagttagtgattttaatattgaacagagtaaaaattctatttcagttaattttggaaatatagataaatcgtatactgttaagtataaggctagaatcagtgacaaaaatgcaaaacatggtaataaatataagaatgtagctaggattgaatctgatggtaagaagatacaagaagatgatgctactgtaagtatatttgatagaggagatgattatcttcttactaaaggacattcaggagcaacaaatattactcaagttggtcaagtaataaactatcagatttcaataaatgatgataaa

SEQ ID NO: 111 - protein, 449 aa, Clostridium difficile
SELGENSQIQSGSTNSSTGEEKESDNKKPEQTPEKDKATDNKKPEQTPEEEKPTDNKKPEQTPEEDKSTDNKKPEQTPEGEKPIDNKKPEQIPEEDKSTDNKKSEQALEDEKPLDNKNTEKTPEEDNLLEDENLLKVLEEELNEENEDYGFVVKINNNTIETESMKKISFNLTYTPTSKGIQAGDSITFKVPDVFNKVNLDYTSECFDKTESNGEYTLTFRELPNGQSVMQGKIGLEAYVKKVDEDTNAKIHIETTGKIESGSGDIDVEIKPGDKTDVPDAKGTLKKLVEGKKSTTVFMPVKNKDINYSIQVNEKQEELKDIILYDELPEGLTLINGSVSVVTSDGKEVSDFNIEQSKNSISVNFGNIDKSYTVKYKARISDKNAKHGNKYKNVARIESDGKKIQEDDATVSIFDRGDDYLLTKGHSGATNITQVGQVINYQISINDDK

SEQ ID NO: 112 - DNA, 1374 bp, Clostridium difficile
tcaccaataagtaatgttgttataacagataatataccagaaggcatgagattaactacttcaggagaagctgggcatgattttagagttgtagaaattccaatgaatgggagctggactccttggagtaaagaaaaaattgccaataatatttcatataaagtagaagaaaaaagaaatgaaagtgggcaagtagataaagttataactggatttacaattaatctcagtaaagaagaagtggaatcaaagttttttatagcttatacattaaaggtaattagtattgaagatagctatataaatagagctgttcttgatgcaaataatagtgaaattgataaaaatgatgagataaactttaagaaaaattctggattaataagcgcaaaaaaagaagttgataaaaaagttttaaacagtagtgataaccagattgttaaatacaaaatcaatatgtcaacttatggagtttatgatgcaggacaagtaaatcttttagatgaagtaaactcagttctagaaatatctaatataaaatattctgataatcttgaacttaaaaaagaagctggagatggaaaaaatacaataagattagtaaataaatacgaatttaaacagataaaagaaggggaacctgtgcaaagttgggttacatttgatgcaaacttcacaaatgtaaaagttggggagactatacgaaatgtggctcagattaatggttcaagtcctccaggagtagagactactaagcaaggttatgcttttgaagctaaaaaagtggatgctttagataaaaatgtactttcaggtgctaagttcaatttagaagatgcatttggaaatatagtagttaaggatttagtcagtgatgaagatggtataattcaatctagtgtaaaaaacccaggaacatattatttagtggagataatggctccacgtggatatgaaaaactgaaggataaaattaaggttgaaattggtaataaagatattggtagaatagtggatattggaaatatagaaaacataagacaagaaaatccaccagtaaatccaccagcaccaccaaatacagatgaaccaatagtaaatccaccagtaccaccaagcacagataaaccaaggaaaccatcaagttcatctgatacagaggatactatagttataaatccaccagtaccaccatcagaagatataataaatccgccaataccagaggtattgaatcctccagtaccaccatcagaagagatgatagaaactcctgttaaacagattattccaataccagaagtagtaaagccatcagtgtcagaagaaaaaaataataaagttaaagatgatactttggtaaatccaccagta

SEQ ID NO: 113 - protein, 458 aa, Clostridium difficile
SPISNVVITDNIPEGMRLTTSGEAGHDFRVVEIPMNGSWTPWSKEKIANNISYKVEEKRNESGQVDKVITGFTINLSKEEVESKFFIAYTLKVISIEDSYINRAVLDANNSEIDKNDEINFKKNSGLISAKKEVDKKVLNSSDNQIVKYKINMSTYGVYDAGQVNLLDEVNSVLEISNIKYSDNLELKKEAGDGKNTIRLVNKYEFKQIKEGEPVQSWVTFDANFTNVKVGETIRNVAQINGSSPPGVETTKQGYAFEAKKVDALDKNVLSGAKFNLEDAFGNIVVKDLVSDEDGIIQSSVKNPGTYYLVEIMAPRGYEKLKDKIKVEIGNKDIGRIVDIGNIENIRQENPPVNPPAPPNTDEPIVNPPVPPSTDKPRKPSSSSDTEDTIVINPPVPPSEDIINPPIPEVLNPPVPPSEEMIETPVKQIIPIPEVVKPSVSEEKNNKVKDDTLVNPPV

SEQ ID NO: 114 - DNA, 3570 bp, Clostridium difficile
atgcaacaaaaatgtaaaaagaaagcactatcaatgattttaagtatctcaatgggacttggatcagtagcatcatttaatgcgtcaaatactttcgcagatactatagaagaaagtactaatgcaggaaatgcagaaggagatactaatgcaggaaatgcaggaggggatgctaatgcaggaaatgcaggaggggatgctaatgcaggaaatgcaggaggggatgctaatgcaggaaatgcaggaggggatgctaatgcaggaaatgcagaagaagattctaatgcaggaaatgcagaaggagatgctaatgcaggaaatgcagaagaagatgctaatgcaggaaatgcagaagaagattctaatgcaggaaatgcagaagaagatatgaatgcattagttgtggaagaagccactgcagaagatcctacatctgtaggagactttaaaattagtggtggagaaataaatgtcgattttaaatttgcaagtggcgttttaactattcttagtggaaaacaaatgacaattcaaaataataatccaaatactccaacaacacataggattgttatacctaaagatgtaaaagctgaattaatatttgatggagtaaatattaaaactgcatctaatagcccatttactttaacaccagataaagatggtggtgcatatgcacatgttatattacaagatggtagtgaaaacaagctagagtcaggtgatgtatattatccaggtatgagagcaggaaaaggtactactctaactattgatgattctgttgtaaatagagatattgaaggagagtttatagttcctgagggtggaaaaattcctagagatgtaactctagaaaatggagacaagttaaaaaaaggagatcgccttacactactagatagtaataatagaggaagtttaaaagttgttggaaattattattctgcaggtattggcggtggaaatactgaaagtggaggaaatattattattaatggtggtgctataactgctataggtcaagaatcgagtcgtaatacaggatatggagctggaataggtggaggcggtaatggtagtggtggagatatcacaatcaatggtggtactataactgctaaaggtgcataccatggagctggaataggtggaggatactatacaacaacaaagaatgcattaagtccctcagtagtagatcctagcacaggttctggttatagtggaaatattacaattaatggtggactttcctattcatatggaggtgcacatggtagtgcatttggggatggatgtgttaatccaggaacaaatagaggatatcgtatacttgtaactggaggaacgattttaccttatatgacaggagtgggagattggatttttgacctaagtgctacaacaggagatgttatagtaacaggtggttcattaaaagcaacaacattcaaaagtttaggtggagcagttgcatacggtgatttagaaaagaaaacaaaagtttttatgaataaaatatctttaaagtatttaggacaagataaagttagtactacattagttgatgattttaaaatgctaattgatggaaaaatttatccttatggagcacctagttatacagatgatcaaggggttctttacttatggttttctgatcaatttaagggatctgaagtatctgttaatttagttgttatagataaaattactggaggaaatataaaaccagatgatttttatgttaaagatataggttcaggttctcaatttttaaagcaatatgaagaatttactattgatgatactccaccatatttgattattaaaagatatgatggattaccatttgaagaagatgtagaaaaattatttttagattggatattaaaagatgggggtattccaataattactcctaaaggtgaaaaactcacagataaaaaatttatgactattagttctcaacgtttaaatgaggaaacaatggaaccagatacaaatttaggaagtgatgaccttacaaagcaagttgatgctggaaaatatcaattaagcattacatcaacacagttttcaaatgtatatccttttaatgaagcttattgggggcatagagcatattataaggcagaaattattcctgctgatacagaaacttcattagttgtagaagagtctaaagctaaaactgatgtttttaaaccaacagatacgtttacattaaatgttactatttcaccagataagaaagaaggaacagattgtgcctctccaagaggttacgtacaattctatattaatggaaaggaatataaagatccagtagaattaaaaactcataataagggtagtgagagtcataattatagtactgcatctattgaatggagacctttagatagcaatcatcatatttttactactgaacaaactattactgtaaaatatattggagatgatataaattacattgaaggtagtgaggatgaaaagaagttaaagttagatatgacaaatgtagatgtagatggggatggaataccggatataaatatagacactgatggtgatggaaggccagatatcaatatagatacgagtggtgattggaagccagatattaacatagatactgataatacaggtgaatggaagcctagtacagaaggtggaaatggagatggtatttggaaacctgataaaaatatagataccaatggagatggaaaccctgatacagattataatcgtccagcaatagatacagataatgatggagtagatgattattggaagcctgataaaaatgtagatactggctcaggaggttatgatacaggtaatccaaatctaaataagccagatccagataatggaggaaatagcaagccggatccagataatggaggaaatagcaaaccagattcaggtaatggaggaaatagcaaaccggattcaggtaatggaggaaatagcaaaccagattcaggtaatggaggaaatagcaaaccggattcaggtaatggaggaaatagcaaaccggatccagataacggaggaaatagcaaaccagatccagataacggtggcaatggtaaaccagatccagataatggaggaaatagcaaaccggatccagataacggtggaaatagtaaaccagacccagataatggaggaaatagcaaaccagatatagatacagatggggatggaaaaccgaatataaatatagacacagatggagatggaaaaccagatataaatatagatacagatggagatggaaaaccagatataaatatagatatagatggagatggaaaaccggatataaatatagatacagatggggatggaaagccggatataaatatagatacagatgggaatggaaaaccagatataaatatagatacagatgaaagtttagatagtaatgtaggtcaaaatgtacaaacaggagatcaaagtaatataatgctagatttagcattaatgttcattagcttgttttttttaattaaaaatctaacaaataaatacttaagacgtaaa

SEQ ID NO: 115 - protein, 1190 aa, Clostridium difficile
MQQKCKKKALSMILSISMGLGSVASFNASNTFADTIEESTNAGNAEGDTNAGNAGGDANAGNAGGDANAGNAGGDANAGNAGGDANAGNAEEDSNAGNAEGDANAGNAEEDANAGNAEEDSNAGNAEEDMNALVVEEATAEDPTSVGDFKISGGEINVDFKFASGVLTILSGKQMTIQNNNPNTPTTHRIVIPKDVKAELIFDGVNIKTASNSPFTLTPDKDGGAYAHVILQDGSENKLESGDVYYPGMRAGKGTTLTIDDSVVNRDIEGEFIVPEGGKIPRDVTLENGDKLKKGDRLTLLDSNNRGSLKVVGNYYSAGIGGGNTESGGNIIINGGAITAIGQESSRNTGYGAGIGGGGNGSGGDITINGGTITAKGAYHGAGIGGGYYTTTKNALSPSVVDPSTGSGYSGNITINGGLSYSYGGAHGSAFGDGCVNPGTNRGYRILVTGGTILPYMTGVGDWIFDLSATTGDVIVTGGSLKATTFKSLGGAVAYGDLEKKTKVFMNKISLKYLGQDKVSTTLVDDFKMLIDGKIYPYGAPSYTDDQGVLYLWFSDQFKGSEVSVNLVVIDKITGGNIKPDDFYVKDIGSGSQFLKQYEEFTIDDTPPYLIIKRYDGLPFEEDVEKLFLDWILKDGGIPIITPKGEKLTDKKFMTISSQRLNEETMEPDTNLGSDDLTKQVDAGKYQLSITSTQFSNVYPFNEAYWGHRAYYKAEIIPADTETSLVVEESKAKTDVFKPTDTFTLNVTISPDKKEGTDCASPRGYVQFYINGKEYKDPVELKTHNKGSESHNYSTASIEWRPLDSNHHIFTTEQTITVKYIGDDINYIEGSEDEKKLKLDMTNVDVDGDGIPDINIDTDGDGRPDINIDTSGDWKPDINIDTDNTGEWKPSTEGGNGDGIWKPDKNIDTNGDGNPDTDYNRPAIDTDNDGVDDYWKPDKNVDTGSGGYDTGNPNLNKPDPDNGGNSKPDPDNGGNSKPDSGNGGNSKPDSGNGGNSKPDSGNGGNSKPDSGNGGNSKPDPDNGGNSKPDPDNGGNGKPDPDNGGNSKPDPDNGGNSKPDPDNGGNSKPDIDTDGDGKPNINIDTDGDGKPDINIDTDGDGKPDINIDIDGDGKPDINIDTDGDGKPDINIDTDGNGKPDINIDTDESLDSNVGQNVQTGDQSNIMLDLALMFISLFFLIKNLTNKYLRRK

SEQ ID NO: 116 - DNA, 1650 bp, Clostridium difficile
atgaataagaaaaatttagctatattaatatcaggtatgatgtttttttctagttcttcagcaatttttgcagacaatactacaaagcaagaaagattaataggtaaaacaagatatgaaacagcagtagaagtaagtaaattgggatgggttcaatcaaaaacagccattatagttaatggtaattctattcaaagtgcgctttgtgcaaatccatttgctaagctaaagaatgcacctatacttttagtaaacaacaacagtattgaaaattcaactaaggctgagcttaaaaggcttggtgtagataatgtgtacattgtagatagtggaaatagcatttcttctaaagtagaaaatgaaataaaatcacttaacataaaaataaataaaatagtaggaaacaatatatatgaaatgtctacaaatgtacttaaagaaatagataagataaaaaagatagaaaatgttgcagttgtaaatggactaaagggactatctgatgcagttagtatagcttctccagcagcaatacataatatgcctataatattagtatcagatgaaaacagcaatgatagtagtataaatttcttaaacaataggtctataaaaaaatcttacatagttggaggaaataagattttatcagacaatacagtaaagaaatatccaaacagagaaagaatcagtggttcagatagaaacaatactaatgcaaaaattattgataaattttataaagataaaaaaataaataatgtatttgtagctaaagatggtattaaccaagaaaatgcattagtagattcattatcaataggagtactagctgctaaagaaaattctcctataatgatatctaatggtagccttgtaaatagtcaaaaagaatttattaaaaataaagatatagatgaaataacacaagtaggaggaggatataatcaaaaagcatttgaagatattttaaaactaaaaaatgtgaacataagaaataaaactaaaaaaatatctttaatacaggctaaagaaatattaaaacaagctcttccaggaagcaatattttagtttgttattatgatgaagatgataatgaatatgactgcaaagttataaaggataatatcctatatgagatagaaattgatgcctactctggtaaaataatagaaattgaaaaagatgatgacttaaatgataataatttaggtacacaaaatatatcattggataaagctaagtctatagcattagatgctgttcctaatggtaatttaatctattgtaaatatgatgctgaagataacgaatacgaggctaaagtaataaaaaataagaaaacatatgaattagagataagtgcatttgatggaagaattgtagatattgacatggacaatgattctgatgatgactttgatgataatgataagaataactctaatactaatgacaacagttctattattagtgctgaaaaagctaaatcaataatgctagataaagtgcctggtgggaaaatagtaaaatttaagtatgatgaagatgacaaagaatatgaaggtgaaataataaaaggaaaaactgaatatgagataacaattaatgcaattactggtaaaatattagaatttgaaatagatgat

SEQ ID NO: 117 - protein, 550 aa, Clostridium difficile
MNKKNLAILISGMMFFSSSSAIFADNTTKQERLIGKTRYETAVEVSKLGWVQSKTAIIVNGNSIQSALCANPFAKLKNAPILLVNNNSIENSTKAELKRLGVDNVYIVDSGNSISSKVENEIKSLNIKINKIVGNNIYEMSTNVLKEIDKIKKIENVAVVNGLKGLSDAVSIASPAAIHNMPIILVSDENSNDSSINFLNNRSIKKSYIVGGNKILSDNTVKKYPNRERISGSDRNNTNAKIIDKFYKDKKINNVFVAKDGINQENALVDSLSIGVLAAKENSPIMISNGSLVNSQKEFIKNKDIDEITQVGGGYNQKAFEDILKLKNVNIRNKTKKISLIQAKEILKQALPGSNILVCYYDEDDNEYDCKVIKDNILYEIEIDAYSGKIIEIEKDDDLNDNNLGTQNISLDKAKSIALDAVPNGNLIYCKYDAEDNEYEAKVIKNKKTYELEISAFDGRIVDIDMDNDSDDDFDDNDKNNSNTNDNSSIISAEKAKSIMLDKVPGGKIVKFKYDEDDKEYEGEIIKGKTEYEITINAITGKILEFEIDD

SEQ ID NO: 118 - DNA, 2220 bp, Clostridium difficile
gtgaatacaatatatgtttttagtatcaggagaattttgaaaacaaaaattaaaaaatcaagtataatcagtttagtaattgcttttagtatggtatttactgcatttacaccaatagtatcttatgctgacgaagtgactagcaatgatacaatacttaatggagaagaacaatcaaatggtcagacaccagatgtagagaaaccatcagacggtcaggtaccaggtggggagaaaccatcagacagtcaagtaccagatggggagaaaccatcagacggtcaggtaccagatggggagaaaccatcagatggtcagataccagatggggagaaaccatcagatggtcagataccagatggagagaaaccatcagatggtcagataccagatggggagaaaccatcagatggtcagatgccagatggagagaagacatcagatagtcagacgccagatgtagagaaaccatcagatggtcagatgccagatggggagaaaccattagatgagcaaactccagaagaagaaaaaccattggaagaagaaatagttatagaggaaatgagtttaaaacaagatattgataaaattcttgatatgactttatctcaaataaataaaatagtatataacttttgggaagatgaagaagatgtaaaggcagatgaacaatcagaaattaaccaagtttttacttcagaagactcatttattagcttatggtatgacaaaaaagcaaaagtaaaaaattcttgtttactaaaagaaatagatggttcagatagaccttatcatgatttaagatttgatgatattacaaagactttaacttttgactatgtaataaagggtcttgtaggagcaagctcaaaagacgacaaatatgtaatagaaggtgaagatggagagcaaactgcattttgttacaataatcatttaagaccaccaagtagtaatggaaagagtccatatttaccagcagaagattttaatggtcaagaaaaccaaaatgaagaagcagttaaatctatactatatgcaggttctgaatttgatggatttggatataagcaacaatttaatttaggtggagaagaaaatgaattgatgacttactcagctactcaaagtgcaatttggattattcttggacaaatggatgaacaagaaagacttaagcagtatcaaggttctataaacctttgtgataaacttatagaaagagcaaaaactgaagaggaaagagctgagtatcagaagaagaaagaagtagcgataaatataaaagcttatttagaagcattgttaaaagcaggtcgtgaagagttaaagccaaataatacaggaaaacctagtttgagtaatggtttaactaagattaactttgaaaaaaatgaagatggtacttatgaaacagaagctgtagccttagtaggttatagtggtgtagtaaagttaagactaccagatggagtaactgcttatgatgtagatggtaatataataggtacaggcgaagtagaaatttcaacgcaacagaaatttaaacttaagagtgttggaaaaccagatgccaaagctaatatttctgctgtatcttatgattatatttttccaaaagctattcaatattataaggcagtgcttgatttaggacaaaaagaccattcatcttcattaccatctagcaagcaaaatttattaagttatacaatagagaaaaagaatggtcaagaagttaactttaatataggtttaccaacagatgatgatgatgttgtaaatccaccagtgccaccaatagatgatgatgttgtaaatccaccggtgccaccaacagatgatacaaatggacataagccaaaaccatcaccaccaatagatgatacagtaataaatccaccagtaccaccaatggatgatacaataataaatccaccagtaccaccaacggaggatgcagtgttaaacccaccagtgccaccaatggaggatgcagtgctaaatccaccagtgccaccaacagatgatacagtgttaaatccaccagtaccaccagtaagtgatacagtggaaaaaactccagaactatcaagagatgatacaatagtaaaatcaccaaaaacaggtgatgaaactcagctaatgtcatatgtatttattagcgtcattgcaatttgtggattagcgtatcaatgtaaaataaaaagaaattaa

SEQ ID NO: 119 - protein, 739 aa, Clostridium difficile
MNTIYVFSIRRILKTKIKKSSIISLVIAFSMVFTAFTPIVSYADEVTSNDTILNGEEQSNGQTPDVEKPSDGQVPGGEKPSDSQVPDGEKPSDGQVPDGEKPSDGQIPDGEKPSDGQIPDGEKPSDGQIPDGEKPSDGQMPDGEKTSDSQTPDVEKPSDGQMPDGEKPLDEQTPEEEKPLEEEIVIEEMSLKQDIDKILDMTLSQINKIVYNFWEDEEDVKADEQSEINQVFTSEDSFISLWYDKKAKVKNSCLLKEIDGSDRPYHDLRFDDITKTLTFDYVIKGLVGASSKDDKYVIEGEDGEQTAFCYNNHLRPPSSNGKSPYLPAEDFNGQENQNEEAVKSILYAGSEFDGFGYKQQFNLGGEENELMTYSATQSAIWIILGQMDEQERLKQYQGSINLCDKLIERAKTEEERAEYQKKKEVAINIKAYLEALLKAGREELKPNNTGKPSLSNGLTKINFEKNEDGTYETEAVALVGYSGVVKLRLPDGVTAYDVDGNIIGTGEVEISTQQKFKLKSVGKPDAKANISAVSYDYIFPKAIQYYKAVLDLGQKDHSSSLPSSKQNLLSYTIEKKNGQEVNFNIGLPTDDDDVVNPPVPPIDDDVVNPPVPPTDDTNGHKPKPSPPIDDTVINPPVPPMDDTIINPPVPPTEDAVLNPPVPPMEDAVLNPPVPPTDDTVLNPPVPPVSDTVEKTPELSRDDTIVKSPKTGDETQLMSYVFISVIAICGLAYQCKIKRN

SEQ ID NO: 120 - DNA, 1032 bp, Clostridium difficile
atgtttaagaaaaagttaatagctgttgcaatgagtataactatgattagtgtagggagcttttcgtatgctcattcaggaagaactgattcatcaggaggtcatcgtgataataaaaataaatctggattaggaagttatcactatcattgtggtggttatccagctcatttacataataatggtggttgtccttatactggaggaggaagcagttctggaacagcaacttcggttaataatgaagaaaagcaaaagaggtctgttggagaaaaaggatataatcaagggtatgaagatgggtataaaggaaattatagttcatcaaattatagtggagattatagtgatacatatgaatcaaagtactcagaaggatatgaaaaaggtaaggctaaattagaagaggaagaaaaggtggctaaagagactggatataatttagggcttacaggtgctaaatctaataatacatatgaaaaagaagttttaaaaaatgcttatgataccggatattcaactggatacaatgaatataagactaaaaagatagaagaatataaagctaaagggatagaggatagcaataaagataaggaaaaaatgacatttgaagaaaacatagattctgaatttatagatgcttataataatgcttatgacgaaatacaagaacaattaaaaaatgattacactactcaaggatttgagagtgctatcaaaggagaaagatttgacacatcaactataggtaatgttaaatatgctaattggtttaaagaaggatatgataatggtaaggttaagttacctaaagcaaaagaaagtgtatataatcaaggttacaatgaagaagattttagtataccagatgaaatgaagtctattgaaactaagttaaaaggtgtatatgatgaaggtttagaaaaaagagaggaagagaaaagtagaaatgctacttatggggttggagctggaacagcagctgtagttgctggagtagtatataagaagaaaaaacgtaaaaagata

SEQ ID NO: 121 - protein, 344 aa, Clostridium difficile
MFKKKLIAVAMSITMISVGSFSYAHSGRTDSSGGHRDNKNKSGLGSYHYHCGGYPAHLHNNGGCPYTGGGSSSGTATSVNNEEKQKRSVGEKGYNQGYEDGYKGNYSSSNYSGDYSDTYESKYSEGYEKGKAKLEEEEKVAKETGYNLGLTGAKSNNTYEKEVLKNAYDTGYSTGYNEYKTKKIEEYKAKGIEDSNKDKEKMTFEENIDSEFIDAYNNAYDEIQEQLKNDYTTQGFESAIKGERFDTSTIGNVKYANWFKEGYDNGKVKLPKAKESVYNQGYNEEDFSIPDEMKSIETKLKGVYDEGLEKREEEKSRNATYGVGAGTAAVVAGVVYKKKKRKKI

SEQ ID NO: 122 - DNA, 1905 bp, Clostridium difficile
atgaaagataaaaaatttacccttcttatctcgattatgattgtatttttatgtgctgtagttggagtttatagtacatctagcaacaaaagtgttgatttatatagtgatgtatatattgaaaaatattttaacagagacaaggttatggaagttaatatagagatagatgaaagtgacttgaaggatatgaatgaaaatgctataaaagaagaatttaaggttgcaaaagtaactgtagatggagatacatatggaaacgtaggtataagaactaaaggaaattcaagtcttatatctgtagcaaatagtgatagtgatagatacagctataagattaattttgataagtataatactagtcaaagtatggaagggcttactcaattaaatcttaataactgttactctgacccatcttatatgagagagtttttaacatatagtatttgcgaggaaatgggattagcgactccagaatttgcatatgctaaagtctctataaatggcgaatatcatggtttgtatttggcagtagaaggattaaaagagtcttatcttgaaaataattttggtaatgtaactggagacttatataagtcagatgaaggaagctcgttgcaatataaaggagatgacccagaaagttactcaaacttaatcgttgaaagtgataaaaagacagctgattggtctaaaattacaaaactattaaaatctttggatacaggtgaagatattgaaaaatatcttgatgtagattctgtccttaaaaatatagcaataaatacagctttattaaaccttgatagctatcaagggagttttgcccataactattatttatatgagcaagatggagtattttctatgttaccatgggattttaatatgtcatttggtggatttagtggttttggtggaggtagtcaatctatagcaattgatgaacctacgacaggtaatttagaagatagacctctcatatcctcgttattaaaaaatgagacatacaaaacaaaataccataaatatctggaagagatagtaacaaaatacctagattcagactatttagagaatatgacaacaaaattgcatgacatgatagcatcatatgtaaaagaagacccaacagcattttatacttatgaagaatttgaaaaaaatataacatcttcaattgaagattctagtgataataagggatttggtaataaagggtttgacaacaataactctaataacagtgattctaataataattctaatagtgaaaataagcgctctggaaatcaaagtgatgaaaaagaagttaatgctgaattaacatcaagcgtagtcaaagctaatacagataatgaaactaaaaataaaactacaaatgatagtgaaagtaagaataatacagataaagataaaagtggaaatgataataatcaaaagctagaaggtcctatgggtaaaggaggtaagtcaataccaggggttttggaagttgcagaagatatgagtaaaactataaaatctcaattaagtggagaaacttcttcgacaaagcaaaactctggtgatgaaagttcaagtggaattaaaggtagtgaaaagtttgatgaggatatgagtggtatgccagaaccacctgagggaatggatggtaaaatgccaccaggaatgggtaatatggataagggagatatgaatggtaaaaatggcaatatgaatatggatagaaatcaagataatccaagagaagctggaggttttggcaatagaggaggaggctctgtgagtaaaacaacaacatacttcaaattaattttaggtggagcttcaatgataataatgtcgattatgttagttggtgtatcaagggtaaagagaagaagatttataaagtcaaaa

SEQ ID NO: 123 - protein, 635 aa, Clostridium difficile
MKDKKFTLLISIMIVFLCAVVGVYSTSSNKSVDLYSDVYIEKYFNRDKVMEVNIEIDESDLKDMNENAIKEEFKVAKVTVDGDTYGNVGIRTKGNSSLISVANSDSDRYSYKINFDKYNTSQSMEGLTQLNLNNCYSDPSYMREFLTYSICEEMGLATPEFAYAKVSINGEYHGLYLAVEGLKESYLENNFGNVTGDLYKSDEGSSLQYKGDDPESYSNLIVESDKKTADWSKITKLLKSLDTGEDIEKYLDVDSVLKNIAINTALLNLDSYQGSFAHNYYLYEQDGVFSMLPWDFNMSFGGFSGFGGGSQSIAIDEPTTGNLEDRPLISSLLKNETYKTKYHKYLEEIVTKYLDSDYLENMTTKLHDMIASYVKEDPTAFYTYEEFEKNITSSIEDSSDNKGFGNKGFDNNNSNNSDSNNNSNSENKRSGNQSDEKEVNAELTSSVVKANTDNETKNKTTNDSESKNNTDKDKSGNDNNQKLEGPMGKGGKSIPGVLEVAEDMSKTIKSQLSGETSSTKQNSGDESSSGIKGSEKFDEDMSGMPEPPEGMDGKMPPGMGNMDKGDMNGKNGNMNMDRNQDNPREAGGFGNRGGGSVSKTTTYFKLILGGASMIIMSIMLVGVSRVKRRRFIKSK

SEQ ID NO: 124 - DNA, 2079 bp, Clostridium difficile
atgaaaaaatttattatatcaattatatctttagtattgtttttttcaaatatatcacttatatacaaagtaaatgctgatgagactaaagttaaaaattataagtttgaaagagatataactattgatggtgttataggaagtaatagtactttttttgaagtaaataaaaattgggatattgaagaagttttattgcatcttaattttagtaagagccaaatattaaatggagatgtttcaagtttaactgtattgataaataatgtaccaataaaatctattaaattaaatgctaagacaaattataaaaatacattagaagtattagttccaaaagattatataattcaaggatataatgaaataaaaataaaaacatacaaaacaatatctgataaaatttgccaggatgattccaatactgggaactggatggttattcacaaagaatcatatatatcaattagatataagcagaaaaaggtggaaaactcaataaatgaatatccgtatccatatgcagaaattgaaaataatcataaattagatacaactatagtagtaccagataatatgactagaggagagactacagcagtgtttaatttggcatcagcatttggaaaaataacaaaaaatgatgatttaaagttagatgttaaattatattcagaaatgaaaaattggtcagatgataatattatatatattggtaaacctgaaaatacagcagaagaaattttggatattttaagtataaaggaacaaaccctattatcttcaaactgtataatcaagcaagtagattcaccatacaataagaataagaagatgatggtggtaattggtagtaatgaagatgatttaataaaggcatcaaatttattaatagaaaatagactttctaatcaagttttatcatcatcagtacttgtaaacaaagagactaatataaaaattaatagggaacaaaaattaaatttaggtcatttaacattaaaagacttaggatattctgactttttgttggaaggagcatttaatcaacaagctttatttgatgtcaaaataccaacgggtaaggtattagatgatggttcaaagattatcttaaatttaagatattctgacaatttagattttgaaaaatctttagttacagtgtctataaatgatgttattgtgggaagtaaaaaattggataggtcacattctaataatgataagttagaattaaaaatacctaaagatatagataataaaaactattatcaagttaaattgacatttaatttgagtataaaaaattcgaattgtgttactagagagagtaataatccttgggcatatgtatcaaataattcttatttggcgttatctacgaaagaaaatgaaaccttatcttttgaaaattatccgtatccatttgttagagatgatgaatttaatgatttaactgtgataatgccagattattcagggtcacaagctatgacctggatgtttagattaggtgttactttaggtgcgaatataaattcacataatggaaatataaatgtaattagaggaaaagaatttagtgacaagtataaggatactaatattgtagtttttggagtgccacataataattctgttataaagatgttaaataataatttaaatataaagttcgataaaaattactccaattttatatcaaatgataagataagctttattgatgattatggaaaaaatatttctaccattcaattaataaaatcaccatataataatcaaaaaaatatcatggtaattagttcaatgaatgaaaaaaacttatatttaggaatggattatttgttgaataaaagtaaagttaatgatttaaaaggagatacattgataattgatgaatacggagaggtagaagatttagcttataatttaaaatctaagaaagaagtaaaagattcaagttggaatatgagtataaataagacaactaaagtatttttaatgatttcttttattactataattgtagtcatgatattatcaatgctatatataaaaaaatataaaagaaga

SEQ ID NO: 125 - protein, 693 aa, Clostridium difficile
MKKFIISIISLVLFFSNISLIYKVNADETKVKNYKFERDITIDGVIGSNSTFFEVNKNWDIEEVLLHLNFSKSQILNGDVSSLTVLINNVPIKSIKLNAKTNYKNTLEVLVPKDYIIQGYNEIKIKTYKTISDKICQDDSNTGNWMVIHKESYISIRYKQKKVENSINEYPYPYAEIENNHKLDTTIVVPDNMTRGETTAVFNLASAFGKITKNDDLKLDVKLYSEMKNWSDDNIIYIGKPENTAEEILDILSIKEQTLLSSNCIIKQVDSPYNKNKKMMVVIGSNEDDLIKASNLLIENRLSNQVLSSSVLVNKETNIKINREQKLNLGHLTLKDLGYSDFLLEGAFNQQALFDVKIPTGKVLDDGSKIILNLRYSDNLDFEKSLVTVSINDVIVGSKKLDRSHSNNDKLELKIPKDIDNKNYYQVKLTFNLSIKNSNCVTRESNNPWAYVSNNSYLALSTKENETLSFENYPYPFVRDDEFNDLTVIMPDYSGSQAMTWMFRLGVTLGANINSHNGNINVIRGKEFSDKYKDTNIVVFGVPHNNSVIKMLNNNLNIKFDKNYSNFISNDKISFIDDYGKNISTIQLIKSPYNNQKNIMVISSMNEKNLYLGMDYLLNKSKVNDLKGDTLIIDEYGEVEDLAYNLKSKKEVKDSSWNMSINKTTKVFLMISFITIIVVMILSMLYIKKYKRR

SEQ ID NO: 126 - DNA, 3399 bp, Clostridium difficile
gtgattataataaattatgaattaattgtaaaatacaatggagatatattgaggttagaagaagaattaggtgtatcagtagagatacttaattcatcatatgcaataataacatcaagtaatgaagaagatgtaaatatacttttaacttatccagaaattgaatttatagaaaagccttttatattacagactcaggatgtgcaaagtttttcaagtacaggaataacaggatttaaaaatagaactggtttaactggaaaaggaactataattggtataattgattcgggaatagattatactctacctgtgtttagagatagtgatggaaggtctaagatattatattattgggaccaatctattcaaggaaatccaccagaaggttttagagaaggaacattatatactaatgaagatataaataatgcaatagatggaagtatgtatatacctatttcaacaactagcttacatgggacacatgttgcaggtatttgtgcaactattgcaagtgatgccagaataatagtggttagagttggaaatatacagaccgatattttttcgagaagtacagagtttatgagggcaattaaatttattttagatagggcattagaattaagaatgcctgttacattaaatataagttatggaagtaatgaaggttcacatagaggaacatctttatttgaacaatatatagatgatatgtgtttattttggaaaaacaatatagttgtagcagctggaaataatgcagataaaggaggtcataaaaggattaggcttcaaaataatattacagaagaagttgagtttatagttggggaaggagagcgtatattaaacataaatatatggccagattttgttgatgattttagtgtacatttggtaaacccatcaaataatcaaacacaagcaatctctctaacttcaggtgagataaggaatactttgggtgaaactagaataactggttatttttaccctatagcaccgtattctctcacaagaagagttactctacaattaagttcaaatacacagataactcctgggttatggaaaattgtatttgaaccaatagatatagtaactggtaatgtaaatatatatttgccaacttctgaaggtctaaatagaaatactagatttctgattcctactcaagagcttactgtaacagttcctggaacagcaagtagagttataacagtaggtagttttaattcaagaacagatatagtatctatattttctggtgaaggagatacacaattaggtgtttttaaacctgatttattagctccaggtgaagatatagtatcttttttaccaggaggtacaagtggagcattaactggaactagcatggctacacctcatgttacaggggtttgttcattgtttatggaatggggaattgtaaatggaaatgatttatttttgtattcacagaaattaagggcattacttctaaagggagcaaggagattaagtaatcaatcttatccaaataattcatcaggatttggttttttaaatttatcagatatagatttgtacactctatctaatataaatcaagacttagaaacagaggatatgggatatagaagtattaataagtcatttaaagatgaggaaaatagttataagtttatagatggttataatatgcaaatacataatgacttagagaatgaaatttatataagtaaaaatgcaagtagacaatcaggaatactatcaggaatagatatagtccatactcctgaatttgaagaagaactagctgggttaggtatgagtcaaaggttttttaagataagtgattcattaggtgtactatctataaataatacagactatagtagtatacaacgagttttgcaacttccttcaatcataagaactgtatcgactacaaagatgacattacttggagaaattaatcgaggtacttttggaggtgtagttgcaacagaagaaatgggcgtaaatttctttaaaaataatcctaatattaatataacaggaagagggactctaatatcaattgcagatacaggaatagactatctacacccagattttatttatccagatggcacttcaaaaatagtatatttatgggaccaaacaaaagaaggaactcctcctgatggtttttatattgggacagaatatacacgagaagatataaatcgagctatcgcagaaaatgaccctagtctatctcaggatgaagttggtcaaggaactatgttgagtgggatatgtgcagggcttggaaatgtaaatagtgaatatgcaggtatagcagaagattctgagctaataataataaaactcggcaagatagatgatttttataatagtgcaatgttgtttgctgcatctcagtatgcatataaaaaagcttttgaacttggaagaccattagttataaatatgtctttaggtaccagtagcctagcaggtttaaccaataggagtaatagtgaaaaagcgttctttactagagggttatgtataacggcaggagcaggaaatgagggcaatacacagacacatacatctggaataataccatatgttggaggttctgttgaagttgaattagagttaaatgaagacgaggaagaattatcattagaactttggttaaatagaccagataaagctgatgtaataatagtatctcccactggtgaagaaagtaaaagtgttggaatttcaaattataataaagtaacaggtttatttgatttagaggggactgaatattctataacatatatatacccaacaactttttctggacagcaatttactaatgttactttaaagaatgcaaaaagaggtgtatggaagattcgattagtaggagtttatattataacaggaagatataacttataccttccaaatagagaacttttaaaaagtggaactagatttagagaggtagaccctttttacactataaattatcctgcgattcaagatgatttaataaccataggagcctacaatactattaatggtagtttatggcaaagttcatcaagagggccaactattgaagacaggttaaaaccagatatagtagcaccaggtgttaatataatagctgcttatcctgggaacacgtatgcaactataactggtacagcagcagcaagtgcacatgcagctggtgctgctgcaatgtattttcaatatacttttgttgacggtagatatccaaaccaagcatatgtgcaaaaaataaaaacttttatgcaagctggtgctagaaaagattcaaacacagtatatccaaatacaaattctggatatgggctcttggatgttagaggaatgtttgatgttttaagatag

SEQ ID NO: 127 - protein, 1132 aa, Clostridium difficile
MIIINYELIVKYNGDILRLEEELGVSVEILNSSYAIITSSNEEDVNILLTYPEIEFIEKPFILQTQDVQSFSSTGITGFKNRTGLTGKGTIIGIIDSGIDYTLPVFRDSDGRSKILYYWDQSIQGNPPEGFREGTLYTNEDINNAIDGSMYIPISTTSLHGTHVAGICATIASDARIIVVRVGNIQTDIFSRSTEFMRAIKFILDRALELRMPVTLNISYGSNEGSHRGTSLFEQYIDDMCLFWKNNIVVAAGNNADKGGHKRIRLQNNITEEVEFIVGEGERILNINIWPDFVDDFSVHLVNPSNNQTQAISLTSGEIRNTLGETRITGYFYPIAPYSLTRRVTLQLSSNTQITPGLWKIVFEPIDIVTGNVNIYLPTSEGLNRNTRFLIPTQELTVTVPGTASRVITVGSFNSRTDIVSIFSGEGDTQLGVFKPDLLAPGEDIVSFLPGGTSGALTGTSMATPHVTGVCSLFMEWGIVNGNDLFLYSQKLRALLLKGARRLSNQSYPNNSSGFGFLNLSDIDLYTLSNINQDLETEDMGYRSINKSFKDEENSYKFIDGYNMQIHNDLENEIYISKNASRQSGILSGIDIVHTPEFEEELAGLGMSQRFFKISDSLGVLSINNTDYSSIQRVLQLPSIIRTVSTTKMTLLGEINRGTFGGVVATEEMGVNFFKNNPNINITGRGTLISIADTGIDYLHPDFIYPDGTSKIVYLWDQTKEGTPPDGFYIGTEYTREDINRAIAENDPSLSQDEVGQGTMLSGICAGLGNVNSEYAGIAEDSELIIIKLGKIDDFYNSAMLFAASQYAYKKAFELGRPLVINMSLGTSSLAGLTNRSNSEKAFFTRGLCITAGAGNEGNTQTHTSGIIPYVGGSVEVELELNEDEEELSLELWLNRPDKADVIIVSPTGEESKSVGISNYNKVTGLFDLEGTEYSITYIYPTTFSGQQFTNVTLKNAKRGVWKIRLVGVYIITGRYNLYLPNRELLKSGTRFREVDPFYTINYPAIQDDLITIGAYNTINGSLWQSSSRGPTIEDRLKPDIVAPGVNIIAAYPGNTYATITGTAAASAHAAGAAAMYFQYTFVDGRYPNQAYVQKIKTFMQAGARKDSNTVYPNTNSGYGLLDVRGMFDVLR

SEQ ID NO: 128 - DNA, 3045 bp, Clostridium difficile
atgaaaaagatattaaaacgattgtgtacgggcttcttagcttttgcaactgtcgttaccgctttaccgagtacacccgttcatgcagaaagtaagcaatactggacggaaagtgcagagcgagtcggtatcattgaaaaagtaatgaatgacggttctatcggttctacattcaatgagggcatgatgaaagttgagggcgaaactgcctattgtattgacatcaatactgactttaagaatggttacaagaccagagctgacgcaagctcacgcatgagtgccgaccagatttcagatgtggcgttatccttagagtatgtcaaacagtatggcgaagctcacaaggaattgaactacaaacaagtctatctgttggaacaatgtgttgtctggcagagattaagcgtacatcttggctggcaatgcgacaacgtgcgagcttcttatgatgaaattccaaaggcaacgcaggacgaagtttttgctggtgcaaaagcctttgtcaaagaaaataaaggacgctatgaatgtggcggttatatctactctggcgaggggcaggaattgggacaattctgggcgaagctgaatgttggaaatgcaaaactgcaaaaaacctccagtaataccagcattacagacggtaacgggaattactctatcgctggtgcaacctacggtgtcttttctgataaggactgcacaaaacagcttgccacccttacgactgataaaaacggaaatacagatgttatagaggtaaaagctggcacagtctatatcaaggaattatctgcaccagcaggatataaagtggataaaacaatctatccattgacaatcaaagctggcgaaacagcgaccttgaaagtatcagatacgccaaaagtaacagacactttagttgagcttttcaagattgacatggaaacacagaaagacaatccgcaggggaacgcttctctagcaggtgcggaatttacatggaaatattatgctggcttctacaataaagacaatcttcctgccgaagctactcgtacatgggttacaaagacaatcgctgaaacagacagcgacgggacaacccactacatcacaaaattagcggacgcatacaaggtatctggcgacagcttctatatgcaggacggaaaagccgttcttcctttaggaacattaaccgttgaggaaacgaaagctccaaacggctacttgttagacggtgcatatatgcaggctggcgacaagtccgaacagattaagggcttatatcttacacagattaccgaggacggcgaccttgccgtattgactggaagtaaccagttttctgtatcagataaggttatccgtggcggtgtgaaaattcagaaacgagatttagaaacgggtgacacaaagccacaaggaagtgccacattgaaagatactgcctttgacatcatttccttaaatgataatgcggtattggttgagggcaagctatacaagaaaaatgaagtcgtaaaaaccattcatacagaccttgagggtgtggcttctacttctgccgaccttttaccttatggaaaattccgtatcgttgagagtgaagctcccgacggatatttgacagacggtgcgaagccgattgactttgcaatcacagaaaacggaaaaatcgtggacttaaccgatgaagcccattctatctacaatcagattaagcgtggagatattgagggcgtgaaaatcggtgcaggcacacacaagcgtcttgctgatgttccttttaggatcacaagtaagacgactggggaaagtcatgttgtggtaactgatgataacgggcaattttccacttctgctgactgggcttctcacaagcacaataccaacgcaggaaagaccagcgaggacggtgtatggtttggagcttctgaaccagacgacagcaagggtgcattgccttacgatgcttacatcattgaagaattgaaatgtgaaagcaacaaaggctttgaacttatcccgccttttgaaatcgtagtatcaagaaataaccttgtgattgatttagggactttgactgatgaatacgaaaaagaaatctctatccataccacagcgaccagcaaagacggcgaaaagactatccttgcaggaaaagaggtaacaatcgttgatacagtcaaattggacggacttacaaaaggtacaaaataccagttaaaaggctggcagatgttaaaggaagaaaacgccgagctaatcattgacgggaaacgtgtggaaaacgactatacctttatcgctgatgaggaagaaatgaaagtggaaatttcctatacatttaatgcgtctgctttaggtggcaagaaccttgttacctttgaagaattgtatgatttaagcaatccagacgaacccgtgaaagttgcggaacacaaggacattgaggacgacgggcagacggtacttatcacagagcgtatcatcaaaattcatacaactgctaccgacaaggacggcaacaaagagcttgaagcaggaaaagacgttacaatcattgataccgtaaccttagagggcttagaagtcggaacacagtacaaacttgtgggctggcagatgttgaaagaagaaaatgcagagcttcttgtcaatggaaaacgtgtggaaagtgattacacctttatcgctgacagcgaaaatatgaaagtggaagttgcctttacttttgacgctacctcccttgacggcaaacagcttgtaacttttgaagaattgtacgacttaagcaatacagacgagccgaagaaagttactgaacataaggacattgaggacgagggacagacgattacctttaaggaaaaaccagaagttccagagaagcccgaacagccacagacaccagaaaagcctagcagacctagcgacagtcccaaaacgggcgacagtacaaaccttatggcttttatcgtgatgttgcttgtgtctggtggtggactggctggaacatatctttataaacgccgtaaaatgaagaaatcataa

SEQ ID NO: 129 - protein, 1014 aa, Clostridium difficile
MKKILKRLCTGFLAFATVVTALPSTPVHAESKQYWTESAERVGIIEKVMNDGSIGSTFNEGMMKVEGETAYCIDINTDFKNGYKTRADASSRMSADQISDVALSLEYVKQYGEAHKELNYKQVYLLEQCVVWQRLSVHLGWQCDNVRASYDEIPKATQDEVFAGAKAFVKENKGRYECGGYIYSGEGQELGQFWAKLNVGNAKLQKTSSNTSITDGNGNYSIAGATYGVFSDKDCTKQLATLTTDKNGNTDVIEVKAGTVYIKELSAPAGYKVDKTIYPLTIKAGETATLKVSDTPKVTDTLVELFKIDMETQKDNPQGNASLAGAEFTWKYYAGFYNKDNLPAEATRTWVTKTIAETDSDGTTHYITKLADAYKVSGDSFYMQDGKAVLPLGTLTVEETKAPNGYLLDGAYMQAGDKSEQIKGLYLTQITEDGDLAVLTGSNQFSVSDKVIRGGVKIQKRDLETGDTKPQGSATLKDTAFDIISLNDNAVLVEGKLYKKNEVVKTIHTDLEGVASTSADLLPYGKFRIVESEAPDGYLTDGAKPIDFAITENGKIVDLTDEAHSIYNQIKRGDIEGVKIGAGTHKRLADVPFRITSKTTGESHVVVTDDNGQFSTSADWASHKHNTNAGKTSEDGVWFGASEPDDSKGALPYDAYIIEELKCESNKGFELIPPFEIVVSRNNLVIDLGTLTDEYEKEISIHTTATSKDGEKTILAGKEVTIVDTVKLDGLTKGTKYQLKGWQMLKEENAELIIDGKRVENDYTFIADEEEMKVEISYTFNASALGGKNLVTFEELYDLSNPDEPVKVAEHKDIEDDGQTVLITERIIKIHTTATDKDGNKELEAGKDVTIIDTVTLEGLEVGTQYKLVGWQMLKEENAELLVNGKRVESDYTFIADSENMKVEVAFTFDATSLDGKQLVTFEELYDLSNTDEPKKVTEHKDIEDEGQTITFKEKPEVPEKPEQPQTPEKPSRPSDSPKTGDSTNLMAFIVMLLVSGGGLAGTYLYKRRKMKKS

SEQ ID NO: 130 - DNA, 4869 bp, Clostridium difficile
atgaaaataccaaagaagattgctgcaatgcttacagttacaatgatagctggaagttcaacagcaggcatagctagtgcacaaactgtggcaacaaatttaacagggcaagaaagatatgaaactgctgttaaaataagtcaagatggatggaaaaatgctgatgaggtagtaatcgtaaacgactcatctatagcagatgctctatctgcaacaccatttgcaaaagcaaaaaatgctccaatacttttaacaagtaaagataaattaaatgataagacgaaagcagaaatacaaagattaaaagctaaaaaagtatacttaataggtggaacttctgtattaagtacaaatatagaaaaagaaataaaagatttaaaaatatcttttgagagaatctctggagctgagagatatcaaacatccttagaattagcaaagaaattagatgctataagtgatgttaagaaaatagctgtagttaatggtgaaaaaggacttgcagatgctgtaagtgtaggagcaccagctgcacaaaacaatatgccagtaatacttgctgattctaaaaatggaacagcagttgcagacaaatttataaaggatgctggaataactcaatcttatgtagtaggtggagagagttcaatttctgaagctgttaaaaataaactaccaaatagtacaagactaggtggaacagatagaaatgatacaaatgcaaaagtaataaaagaattttataaaaagacagatttaaaaaatgcttatgtaactaaagatggtatgaataaacaagaccaacttatagatgcactagcagtaggtgtattaggtgctaaaaatcaatcaccagtagttttagttggaaagaacttatcagcttcacaaaaatctctagttaactctaagagttttgataagataactaaagttggtgggaatggtaatgagacagcatttaatgaaatgaagtcattacaagaagtaaaaacagttgaagccaaaacaatttctgaattaaaatcagctatagataaagctactgctaatgatgttataaacttcaaaccaactagtgaggttaaagaagcatttacaatacaaactgataaagcagtaacagtaaacttaaatggtacatatacaaagactgtgactatcaacatgcctaatggtgatgtaaataactatgcaaaagtggatgatgtagttatagatgatgtaaaagatggaacttttgttaactatggaaaaataactaacttaaaggttaatgataaaaatggagccaagatagaaaataattctaaaggtgagattggtagtttaacagtagcatctggagcaagtcaagtaaaagtgactaatggtggtaagataactacagttacaaataattctaaagggactactatagataataaaggtacaataagtagtgttaagggagataattctccaacaataagtggaaatagtccaagttctaactcttcaggaggaagttcatcaagtggaggttcttcaggaggaagtagtggaggaagttcttcatcaaaggtaggtcaaataaaatttagtgcaacagataaacaaataaaaatggcatcaggagataagacagtagatccatcagataacacatatatactaaaattaacaaatgggacagtaaaagatggagatgtaaaagctaatgttaaagtagcaggattaccatcaggactagattatacagcagtaggaaatagatcagcaaatacaataacaattacagtatcaggaacagcaagccaatcaatacaaaatgatttaaataatgtaagtgtgctagttaaagcaggagcagtatctggaacaggagctacagattcaattgcaaatacaacatttgaaattaaaaaatatgtggcgccagcaataggtcaattaacttttgatgcaacagataaacaaataaaaatggcatcaggagataagacagtagatccatcagatgacacatatgtactaacattaacaaaaggaacagcaaaagatggagatgtaaaggctaatgttgaagtaacaggattaccatcagggttagattatacagcagaaggagattcatcaacaaatacaataacaataacagtatcaagaacagcaagccaagcagtacaaactgatttagataatgtaagtgtgttagttaaagcaggagcagtatctgaaacaactgccacagattcagcagcaaatgcaacatttgaagttaaaaaatatgtggcagcgccagcagtaggtcaattaacttttgatgcaacagataaacaaataaaaatggcatcaggagataagacagtagacccatcagatgacacatatgtactaacattaacaaaaggaacagcaaaagatggagatataaaggctaatgttgaagtaacaggattaccatcagggttagattatacagcagaaggagattcatcagcaaatacaataacaataacagtatcaggaacagcaagccaagcagtacaaactgatttagataatgtaagtgtgctagttaaagcaggagcagtatctgaaacaactgctacagattcagcagcaaatgcaacatttgaagttaaaaaatatgtggcagcgccagcagtaggtcaattaacttttgatgcaacagataaacaaataaaaatggcatcaggagataagacagtagatccatcagatgacacatatgtactaacattaacaaaaggaacagcaaaagatggagatgtaaaggctaatgttgaagtaacaggattaccatcagggttagattatacagcagaaggagattcatcagcaaatacaataacaataacagtatcaggaacagcaagccaagcagtacaaactgatttagataatgtaagtgtgttagttaaagcaggagcagtatctgaaacaactgctacagattcagcagcaaatgcaacatttgaagttaaaaaatatgtggcaccagcaataggtcaattaacttttgatgcaacagataaacaaataaaaatggcatcaggagataagacagtagacccatcagatgacacatatgtactaacattaacaaaaggaacagcaaaagatggagatgtaaaggctaatgttgaagtaacaggattaccatcagggttagattatacagcagagggagattcatcagcaaatacaataacaataacagtatcaggaacagcaagccaagcagtacaaactgatttagataatgtaagtgtgctagttaaagcaggagcagtatctgaaacaactgccacagattcagcagcaaatgcaacatttgaagttaaaaaatatgtggcaccagcaataggtcaattaacttttgatgcaacagataaacaaataaaaatggcatcaggagataagacagtagacccatcagatgacacatatgtactaacattaacaaaaggaacagcaaaagatggagatgtaaaggctaatgttgaagtaacaggattaccatcagggttagattatacagcagagggagattcatcagcaaatacaataacaataacagtatcaggaacagcaagccaagcagtacaaactgatttagataatgtaagtgtgctagttaaagcaggagcagtatctgaaacaactgccacagattcagcagcaaatgcaacatttgaagttaaaaaatatgtggcaccagcaataggtcaattaacttttgatgcaacagataaacaaataaaaatggcatcaggagataagacagtagacccatcagatgacacatatgtactaacattaacaaaaggaacagcaaaagatggagatgtaaaggctaatgttgaagtaacaggattaccatcagggttagattatacagcagagggagattcatcagcaaatacaataacaataacagtatcaggaacagcaagccaagcagtacaaactgatttagataatgtaagtgtgctagttaaagcaggagcagtatctgaaacaactgccacagattcagcagcaaatgcaacatttgaagttaaaaaatatgtggcaccagcaataggtcaattaacttttgatgcaacagataaacaaataaaaatggcatcaggagataagacagtagacccatcagatgacacatatgtactaacattaacaaaaggaacagcaaaagatggagatgtaaaggctaatgttgaagtaataggattaccatcagggttagattatacagcagaaggagattcatcagcaaatacaataacaataacagtatcaggaacagcaagccaagcagtacaaactgatttagataatgtaagtgtgctagttaaagcaggagcagtatctgaaacaactgctacagattcagcagcaaatgcaacatttgaagttaaaaaatatgtggcaccagcaataggtcaattaacttttgatgcaacagataaacaaataaaaatggcatcaggagataagacagtagacccatcagatgacacatatgtactaacattaacaaaaggaacagcaaaagatggagatgtaaaggctaatgttgaagtaataggattaccatcagggttagattatacagcagaaggagattcatcagcaaatacaataacaataacagtatcaggaacagcaagccaagcagtacaaactgatttagataatataagtgtgttagttaaagcaggagcagtatctgaaacaactgctacagattcagcagcaaatgcaacatttgaagttaaaaaacatgcgtcagatccaatatcaacaataggaaaaatatcttctgggctatcaagtttatttaatatattaaaataa

SEQ ID NO: 131 - protein, 1622 aa, Clostridium difficile
MKIPKKIAAMLTVTMIAGSSTAGIASAQTVATNLTGQERYETAVKISQDGWKNADEVVIVNDSSIADALSATPFAKAKNAPILLTSKDKLNDKTKAEIQRLKAKKVYLIGGTSVLSTNIEKEIKDLKISFERISGAERYQTSLELAKKLDAISDVKKIAVVNGEKGLADAVSVGAPAAQNNMPVILADSKNGTAVADKFIKDAGITQSYVVGGESSISEAVKNKLPNSTRLGGTDRNDTNAKVIKEFYKKTDLKNAYVTKDGMNKQDQLIDALAVGVLGAKNQSPVVLVGKNLSASQKSLVNSKSFDKITKVGGNGNETAFNEMKSLQEVKTVEAKTISELKSAIDKATANDVINFKPTSEVKEAFTIQTDKAVTVNLNGTYTKTVTINMPNGDVNNYAKVDDVVIDDVKDGTFVNYGKITNLKVNDKNGAKIENNSKGEIGSLTVASGASQVKVTNGGKITTVTNNSKGTTIDNKGTISSVKGDNSPTISGNSPSSNSSGGSSSSGGSSGGSSGGSSSSKVGQIKFSATDKQIKMASGDKTVDPSDNTYILKLTNGTVKDGDVKANVKVAGLPSGLDYTAVGNRSANTITITVSGTASQSIQNDLNNVSVLVKAGAVSGTGATDSIANTTFEIKKYVAPAIGQLTFDATDKQIKMASGDKTVDPSDDTYVLTLTKGTAKDGDVKANVEVTGLPSGLDYTAEGDSSTNTITITVSRTASQAVQTDLDNVSVLVKAGAVSETTATDSAANATFEVKKYVAAPAVGQLTFDATDKQIKMASGDKTVDPSDDTYVLTLTKGTAKDGDIKANVEVTGLPSGLDYTAEGDSSANTITITVSGTASQAVQTDLDNVSVLVKAGAVSETTATDSAANATFEVKKYVAAPAVGQLTFDATDKQIKMASGDKTVDPSDDTYVLTLTKGTAKDGDVKANVEVTGLPSGLDYTAEGDSSANTITITVSGTASQAVQTDLDNVSVLVKAGAVSETTATDSAANATFEVKKYVAPAIGQLTFDATDKQIKMASGDKTVDPSDDTYVLTLTKGTAKDGDVKANVEVTGLPSGLDYTAEGDSSANTITITVSGTASQAVQTDLDNVSVLVKAGAVSETTATDSAANATFEVKKYVAPAIGQLTFDATDKQIKMASGDKTVDPSDDTYVLTLTKGTAKDGDVKANVEVTGLPSGLDYTAEGDSSANTITITVSGTASQAVQTDLDNVSVLVKAGAVSETTATDSAANATFEVKKYVAPAIGQLTFDATDKQIKMASGDKTVDPSDDTYVLTLTKGTAKDGDVKANVEVTGLPSGLDYTAEGDSSANTITITVSGTASQAVQTDLDNVSVLVKAGAVSETTATDSAANATFEVKKYVAPAIGQLTFDATDKQIKMASGDKTVDPSDDTYVLTLTKGTAKDGDVKANVEVIGLPSGLDYTAEGDSSANTITITVSGTASQAVQTDLDNVSVLVKAGAVSETTATDSAANATFEVKKYVAPAIGQLTFDATDKQIKMASGDKTVDPSDDTYVLTLTKGTAKDGDVKANVEVIGLPSGLDYTAEGDSSANTITITVSGTASQAVQTDLDNISVLVKAGAVSETTATDSAANATFEVKKHASDPISTIGKISSGLSSLFNILK

SEQ ID NO: 132 - DNA, 2919 bp, Clostridium difficile
atgaagaaaggaaatagaaaggcattattaattagtttaattatgattttaagtatggtggtgtctacaatatatccaactgtatcttatgcttcagaattaggagagaatagtcagattcaaagtggttcaactaattcatcaactggagaggagaaggaaagcgacaataaaaagccagaacagactccagagaaagataaggcaacagataataaaaaaccagaacagaccccagaggaagaaaaaccaacagataataaaaaaccagaacagaccccagaagaagataagtcaacagataataaaaagccagagcaaactccagaaggagaaaagccaatagataataaaaagccagagcagataccagaagaagataagtcaacagataataaaaagtcagaacaagctttagaagatgaaaaaccactagacaataaaaatacagaaaaaactccagaggaagataatctattagaagatgaaaatttattgaaagttttagaagaagaacttaatgaagaaaatgaagactatggatttgttgtaaaaattaataacaatacaatagaaacggaatcaatgaaaaaaatatcatttaatttaacttatactccaacatcaaaaggaatacaagcaggagattcaataacttttaaggtgccagatgtattcaataaagttaatttagattatacaagtgaatgctttgataaaacagaaagtaatggagagtatacacttacatttagagaattacctaatggccaaagtgtaatgcaaggtaaaataggtttggaagcatatgttaaaaaggttgatgaagatactaatgcaaaaatacatattgaaactactggaaaaatagaaagtggaagtggagatatagatgtagaaataaaacctggagataaaacggatgttccagatgctaaaggaacacttaaaaagcttgttgaaggaaaaaaatcaactactgtatttatgccagttaaaaataaagatataaattacagtatacaagtaaatgaaaagcaggaagagttaaaagatattattttgtatgatgagcttcctgaaggattgacattgataaatggttctgtaagtgtagtaacaagtgatggaaaagaagttagtgattttaatattgaacagagtaaaaattctatttcagttaattttggaaatatagataaatcgtatactgttaagtataaggctagaatcagtgacaaaaatgcaaaacatggtaataaatataagaatgtagctaggattgaatctgatggtaagaagatacaagaagatgatgctactgtaagtatatttgatagaggagatgattatcttcttactaaaggacattcaggagcaacaaatattactcaagttggtcaagtaataaactatcagatttcaataaatgatgataaatcaccaataagtaatgttgttataacagataatataccagaaggcatgagattaactacttcaggagaagctgggcatgattttagagttgtagaaattccaatgaatgggagctggactccttggagtaaagaaaaaattgccaataatatttcatataaagtagaagaaaaaagaaatgaaagtgggcaagtagataaagttataactggatttacaattaatctcagtaaagaagaagtggaatcaaagttttttatagcttatacattaaaggtaattagtattgaagatagctatataaatagagctgttcttgatgcaaataatagtgaaattgataaaaatgatgagataaactttaagaaaaattctggattaataagcgcaaaaaaagaagttgataaaaaagttttaaacagtagtgataaccagattgttaaatacaaaatcaatatgtcaacttatggagtttatgatgcaggacaagtaaatcttttagatgaagtaaactcagttctagaaatatctaatataaaatattctgataatcttgaacttaaaaaagaagctggagatggaaaaaatacaataagattagtaaataaatacgaatttaaacagataaaagaaggggaacctgtgcaaagttgggttacatttgatgcaaacttcacaaatgtaaaagttggggagactatacgaaatgtggctcagattaatggttcaagtcctccaggagtagagactactaagcaaggttatgcttttgaagctaaaaaagtggatgctttagataaaaatgtactttcaggtgctaagttcaatttagaagatgcatttggaaatatagtagttaaggatttagtcagtgatgaagatggtataattcaatctagtgtaaaaaacccaggaacatattatttagtggagataatggctccacgtggatatgaaaaactgaaggataaaattaaggttgaaattggtaataaagatattggtagaatagtggatattggaaatatagaaaacataagacaagaaaatccaccagtaaatccaccagcaccaccaaatacagatgaaccaatagtaaatccaccagtaccaccaagcacagataaaccaaggaaaccatcaagttcatctgatacagaggatactatagttataaatccaccagtaccaccatcagaagatataataaatccgccaataccagaggtattgaatcctccagtaccaccatcagaagagatgatagaaactcctgttaaacagattattccaataccagaagtagtaaagccatcagtgtcagaagaaaaaaataataaagttaaagatgatactttggtaaatccaccagtaccaccaaaaacaggggatagtactacaattattggagaaatacttttagttataggagctattgtaggacttatcgtattaagaagaaataaaaatacaaattag

SEQ ID NO: 133 - protein, 972 aa, Clostridium difficile
MKKGNRKALLISLIMILSMVVSTIYPTVSYASELGENSQIQSGSTNSSTGEEKESDNKKPEQTPEKDKATDNKKPEQTPEEEKPTDNKKPEQTPEEDKSTDNKKPEQTPEGEKPIDNKKPEQIPEEDKSTDNKKSEQALEDEKPLDNKNTEKTPEEDNLLEDENLLKVLEEELNEENEDYGFVVKINNNTIETESMKKISFNLTYTPTSKGIQAGDSITFKVPDVFNKVNLDYTSECFDKTESNGEYTLTFRELPNGQSVMQGKIGLEAYVKKVDEDTNAKIHIETTGKIESGSGDIDVEIKPGDKTDVPDAKGTLKKLVEGKKSTTVFMPVKNKDINYSIQVNEKQEELKDIILYDELPEGLTLINGSVSVVTSDGKEVSDFNIEQSKNSISVNFGNIDKSYTVKYKARISDKNAKHGNKYKNVARIESDGKKIQEDDATVSIFDRGDDYLLTKGHSGATNITQVGQVINYQISINDDKSPISNVVITDNIPEGMRLTTSGEAGHDFRVVEIPMNGSWTPWSKEKIANNISYKVEEKRNESGQVDKVITGFTINLSKEEVESKFFIAYTLKVISIEDSYINRAVLDANNSEIDKNDEINFKKNSGLISAKKEVDKKVLNSSDNQIVKYKINMSTYGVYDAGQVNLLDEVNSVLEISNIKYSDNLELKKEAGDGKNTIRLVNKYEFKQIKEGEPVQSWVTFDANFTNVKVGETIRNVAQINGSSPPGVETTKQGYAFEAKKVDALDKNVLSGAKFNLEDAFGNIVVKDLVSDEDGIIQSSVKNPGTYYLVEIMAPRGYEKLKDKIKVEIGNKDIGRIVDIGNIENIRQENPPVNPPAPPNTDEPIVNPPVPPSTDKPRKPSSSSDTEDTIVINPPVPPSEDIINPPIPEVLNPPVPPSEEMIETPVKQIIPIPEVVKPSVSEEKNNKVKDDTLVNPPVPPKTGDSTTIIGEILLVIGAIVGLIVLRRNKNTN

SEQ ID NO: 134 - DNA, 894 bp, Clostridium difficile
tgttcaatggaaggaccaagtaaatcagataataaaggtggttcagacaagaaagatttaactattggagtatctacaataactcttcaacatcaattttttatagatattgatgagggaataaaagaaaaagctaaagaattaggtgtgaaagttatagtaaatgacccagaccaagatgtagctaagcaaacatcagcaatagaagattttatacaacaaaatgtagatggaatgatagtacttggaactgataattcggctatagtaccagcagtagaaggagcatttgaaaaaatgccagtagttacagtagatgctgtattaaatactgaaaatattacaagttatgtaggaacagttagttatgatgctggtaaaaaattaggggaatacactaaaaaatacatagatgaaaagttaggtggaaagtcagaaatagcaatagtgacagatttaaaatctcaaatacaaatgcagagaatagatggatttaaagatgcattaaaaggttcagcaaatgttaagatattaaattcacaaccaggatatgacagagaagaatctcttaatacagtagaaaacttaattcaatctaatccagatgtagatataatatatgcaacagctgaaaatagtgtactaggagctaaagctgcacttgaatctgcaaaaaataaggatgttaagattgtaggatttgacttaactgaagaagcatcaagtggaataacagatggaactattcttgctatgattcaacaacaacctaaagagatgggacgtttagctgtagaagcagtagtaaaagctataaaaggggaaaaggtagaaaagaatataccagtaccagctttactttatgataaggaaaatataaaagactttaagaat

SEQ ID NO: 135 - protein, 298 aa, Clostridium difficile
CSMEGPSKSDNKGGSDKKDLTIGVSTITLQHQFFIDIDEGIKEKAKELGVKVIVNDPDQDVAKQTSAIEDFIQQNVDGMIVLGTDNSAIVPAVEGAFEKMPVVTVDAVLNTENITSYVGTVSYDAGKKLGEYTKKYIDEKLGGKSEIAIVTDLKSQIQMQRIDGFKDALKGSANVKILNSQPGYDREESLNTVENLIQSNPDVDIIYATAENSVLGAKAALESAKNKDVKIVGFDLTEEASSGITDGTILAMIQQQPKEMGRLAVEAVVKAIKGEKVEKNIPVPALLYDKENIKDFKN

SEQ ID NO: 136 - DNA, 723 bp, Clostridium difficile
ccagcattgtttagaaatatagaaaaaagtaaagcagttacatgtctttctaatagagaaaatataaagactcaaattgttattgcaatggctgaggaatcaagtaagggcaagaatgaagtcatgaaagaggtattagaaaacaaagatggtaagtactttgaaacagaaccaaagtgtaagtcaggtggaatatattcagcaacgtttgatgatggttatgatggaataactggaatagaaagcattgcaaaagtgtatgttacttgtacaaaacatccagatggtgttgaaatggctagggatatacatcaaagtatgaaagatttgattgcatcattttcacaagacccttctataataccaggagcctcaaagggtaatgatgattttagaaaatatttattagacaataaatataaaaatgggtggcctacaattccagatgaatttaaggcaaaatatggattaagtaaggatacactatatatacaaccatatgcatatagtcctactaaatctgatgctactgtagttgtatttgcaaataataagactgggggtaattggtatacttccctagtttacgattatgatgaaggtagatggtataaaggtaaaaatggtatttctgttgcaggtaggtcatgggatgttgacacagatagtgttaagtctgtaaaaacagagattcattctaaagagggatggggtcctttaaat

SEQ ID NO: 137 - protein, 241 aa, Clostridium difficile
PALFRNIEKSKAVTCLSNRENIKTQIVIAMAEESSKGKNEVMKEVLENKDGKYFETEPKCKSGGIYSATFDDGYDGITGIESIAKVYVTCTKHPDGVEMARDIHQSMKDLIASFSQDPSIIPGASKGNDDFRKYLLDNKYKNGWPTIPDEFKAKYGLSKDTLYIQPYAYSPTKSDATVVVFANNKTGGNWYTSLVYDYDEGRWYKGKNGISVAGRSWDVDTDSVKSVKTEIHSKEGWGPLN

SEQ ID NO: 138 - DNA, 858 bp, Clostridium difficile
ctagataagattgaaaatattcaaggagtagataaatatgaaacagctgggcttatttcagataagcaagattttacaacagcagttcttatcaatgcagactctacaatggtagatggaattgctgcaagtggtcttgcaggagtaaataatgcagctattttattaactaataaggatgatataccagaagcaacgcttcaaagactgaatagagttactaagatatatgtaataggtggagaaaattctataagtaaagatgtagaaaaaatgttacttatgagaagaatgcaagttataagaattgatggtgtagatagagtagatacaagttataaaattgcaggcgaaatagaaaaaattaaaaacagtgataagatgtttttagtaaatggatttaaggatgaagctgatgcagtaagtgttgcatctgttgcttatagagatggagctcctataatattgacaaaagatataccttcagcagaagaagacacagacttagacccatggtttggagtttctcctgttccagtatatgctattggaggagagtctacattaagtgattacatagtgagcagatatagagcaactagaattggcggtgttgatagatatcaaactaataaaaatgttattgaaaagttctataatggagcaaaagagttctatataacaagtggagacgatttagtttatgctttagttgcatcaccacttgcaaaaaatgctcctgttgttttagtttcaaataaaagtgataagagtatattaagtggagctagtaaagtaacagcaataggtataagtgataagagtattatagagcaatgtttggatgctgtaaagaag

SEQ ID NO: 139 - protein, 286 aa, Clostridium difficile
LDKIENIQGVDKYETAGLISDKQDFTTAVLINADSTMVDGIAASGLAGVNNAAILLTNKDDIPEATLQRLNRVTKIYVIGGENSISKDVEKMLLMRRMQVIRIDGVDRVDTSYKIAGEIEKIKNSDKMFLVNGFKDEADAVSVASVAYRDGAPIILTKDIPSAEEDTDLDPWFGVSPVPVYAIGGESTLSDYIVSRYRATRIGGVDRYQTNKNVIEKFYNGAKEFYITSGDDLVYALVASPLAKNAPVVLVSNKSDKSILSGASKVTAIGISDKSIIEQCLDAVKK

SEQ ID NO: 140 - DNA, 933 bp, Clostridium difficile
tgttcaccaggaaaagataaccctaaaaataaggagctatcagttgtcaaacaagtaaaagtagctgttccagatggactaccagcagtggcaatagctaaacttgcaaatgaaaatccagagattaaagaaggatatgaaacagtgtatagcattgaaaagacacctgaggcgatttccactagagtgatgaaaaaagatgcagatatagctatagttccttcaaacatggctgcaatagcgtataataaaacttcatcatataatattgttggaactgtaggaatgggttcactttatttggtgtcaacagaaaatataaaagattactctgatttagttggtaaagaagttggatgtactggaaaaggacttactccagacataactataaaaagtcttttgttacaaaaggatataaattattcagatataaaatttaattatgtaagttcagcaagtgaactggtaccattattggctactggtaaagttaaaacaggtattgttccagaacctgcacttagtgctttgatgtctaaaaatccagacataaaaattataaaaagtttaaatgactcatggaaggaagtaagtggttcaaaagacggttatcctcaatctactttaattgtaaagtctgaatttttaagagataataaagattttgttgattcttttgtaggtcaattatcaaatagtatagattgggcaaacaaaaatcctgaagaattaggtgcatattctgaaaaaataaaaatatctactgaatcaaagataataggaaaatctcttgaaagagctaatttgaaatatattccagttaaggacatgattaaagattataaaaattactatgagaaattagctaattttgatgataagacattaggaggcaaagtaccagatgaagcaatatactttgttgagaaa

SEQ ID NO: 141 - protein, 332 aa, Clostridium difficile
CSPGKDNPKNKELSVVKQVKVAVPDGLPAVAIAKLANENPEIKEGYETVYSIEKTPEAISTRVMKKDADIAIVPSNMAAIAYNKTSSYNIVGTVGMGSLYLVSTENIKDYSDLVGKEVGCTGKGLTPDITIKSLLLQKDINYSDIKFNYVSSASELVPLLATGKVKTGIVPEPALSALMSKNPDIKIIKSLNDSWKEVSGSKDGYPQSTLIVKSEFLRDNKDFVDSFVGQLSNSIDWANKNPEELGAYSTGTTCACCAGGAAAAGATAACEKIKISTESKIIGKSLERANLKYIPVKDMIKDYKNYYEKLANFDDKTLGGKVPDEAIYFVEK

SEQ ID NO: 142 - DNA, 1200 bp, Clostridium difficile
cttgaaaagggaacagtaacagcaagtgccttgaatataagaagtggaccaagttctgattgcgataaggtagcaaaattatacaagggaaaaactgtagagattttagaaaagtctaatggatggtataaagtaagggtatcgagttctgttgttggatggggaagtgcaaaatacatatcaacaagtggttcgtctgaaggtacatcaagtcaaaataattcaacttcaagtgggacaactattagtggaaatggtaaagtaaatgtgagttctagactgaatgtaagaagtggtgcaggtactaactattcattagttggtaaagcaaataatggagatgtagtaaagttactagaacaaagcaatggatggtataaaataaaactatcaaatggagttactggatgggctagtagccaatatatctctaaaacatcagaggatgttggaacgaataattctagtaattcaaatagtactaataattctgataaaaaaccatctagcgaagaatcaattgaaggcaagaatggtaaggtaacatctgctgtgagtttaaatgtaagaagtggtcctgggacaagctattctataataggaaaattaaatggtggagatgttgttgaattaaaagctaaaagtaatggttggtataaggtaaagttatcgagtggaacaattggatgggtgagtgccagttatatttctgagactaatgaggatacaaaagaaaaaccaaattcatcatctaaccaaaattctcaatctaatagtaactcaaagccatcatttactggaaattcagataaatctacagcaaaaggttcaacaatcgtagattttgcatatactcttattggaataccatatcaatggggagcttcaggacctgataaatttgactgttctggatttacacagtatgtttttaaacattctgtaggcgtttctattcctagagtttctagagaacaggctaattttggaagtgcaatttctatggggaattatgcaccaggagatttagtttattttgacactgatggtgatggaacaactaatcatgtaggtatatatgtaggaaatagtaaatttatccattgtagtggtactcagactaatcctaataaggttaaagtggataatttaactagttcatattggtctaaagtattacttggtgcaagaagatttgtt

SEQ ID NO: 143 - protein, 400 aa, Clostridium difficile
LEKGTVTASALNIRSGPSSDCDKVAKLYKGKTVEILEKSNGWYKVRVSSSVVGWGSAKYISTSGSSEGTSSQNNSTSSGTTISGNGKVNVSSRLNVRSGAGTNYSLVGKANNGDVVKLLEQSNGWYKIKLSNGVTGWASSQYISKTSEDVGTNNSSNSNSTNNSDKKPSSEESIEGKNGKVTSAVSLNVRSGPGTSYSIIGKLNGGDVVELKAKSNGWYKVKLSSGTIGWVSASYISETNEDTKEKPNSSSNQNSQSNSNSKPSFTGNSDKSTAKGSTIVDFAYTLIGIPYQWGASGPDKFDCSGFTQYVFKHSVGVSIPRVSREQANFGSAISMGNYAPGDLVYFDTDGDGTTNHVGIYVGNSKFIHCSGTQTNPNKVKVDNLTSSYWSKVLLGARRFV

SEQ ID NO: 144 - DNA, 741 bp, Clostridium difficile
tgttcatcaggaaataataaaaataaagaagaacaaaaagttataagagttgcaacatcaggaacatattacccttttgcttttaaagataaagataaacttaaagggtttgaagtagatttttgggatgaatttgctaaacgaactaattgtaaagttgaatgggtattaactgattttagtggattatttggattattagaagctgataaagcagatgctgtatctgctcaacttactgcaacacctgaaagagagaaaaaatatgctttttcagatgcttataattatagtggaacaaacattattgttagagaagatgatactagtataaaatcaatagatgatttagttggcaagaaagtaggtgtgggtactggagcagtagcaaatgaaatattaaaagaaaaatacccaaatgatgaaataaaaatagtaaattattcaagtgcgactcttaaagggaattatcaagacctagaaatgggaagattagatgcagtagttgcgcaggatgttgaggctttaatagctataaaagaacaaaaattaaatcttaaaatgatagaacctccaattcaatttggtgcctgttcttttgcgcttcaaaaaaatgaaaaaggtgaaaaatggacaaaagaaattaacgaagtaattgaagagatgtataaagatgggactttgactaaaatatctgaaaactggctaggaaaagacattactaaggagcctattaatgag

SEQ ID NO: 145 - protein, 247 aa, Clostridium difficile
CSSGNNKNKEEQKVIRVATSGTYYPFAFKDKDKLKGFEVDFWDEFAKRTNCKVEWVLTDFSGLFGLLEADKADAVSAQLTATPEREKKYAFSDAYNYSGTNIIVREDDTSIKSIDDLVGKKVGVGTGAVANEILKEKYPNDEIKIVNYSSATLKGNYQDLEMGRLDAVVAQDVEALIAIKEQKLNLKMIEPPIQFGACSFALQKNEKGEKWTKEINEVIEEMYKDGTLTKISENWLGKDITKEPINE

SEQ ID NO: 146 - DNA, 1617 bp, Clostridium difficile; identical to SEQ ID NO: 86

SEQ ID NO: 147 - protein, 539 aa, Clostridium difficile; identical to SEQ ID NO: 87

SEQ ID NO: 148 - DNA, 1776 bp, Clostridium difficile; identical to SEQ ID NO: 88

SEQ ID NO: 149 - protein, 592 aa, Clostridium difficile; identical to SEQ ID NO: 89

SEQ ID NO: 150 - DNA, 1020 bp, Clostridium difficile
tgtagtagtaaaccaaaagaaaaagaagaagcaaaaactggaaaagatgattatacaataacagtaggttattataattgtgaccatatgactgcgggaccagtagcagaatcggcaggaatatataaagatttaggtcttaatgtaaaaactgttggaaatggtaaagttcctgaagctatggcagcaggaaaaatggatgcaggttacataggaactaaggggttagttggagcaatacctaagggttcgccaataacaatagcagctaacaaccatactggtggttctgaatatttaatagtttcaaaagatataaaagaacctaaagatttaataggtaaaaaaattgcaacagatatgagtgatttcttatggacaagtgattatggtccagaaacaggtctaccaactgacccatcaaaatatgaagttgtaaatatggattcagacaaagataaatatttagctcttaaaactgggaaaattcaagcttttacatcttgtgacccttggggttctgtagctgaaaatgacggtgcaggaaaaataatagcatctactcaatataaagaaaaagctaatggcaaagaatataactgttgttcattctcattaaacaaaaactttataaaagaacatccagatttagcaaaaaaattggttctagcacatacaaaagcaatagaatatatatatacaaatccagctgaagcagctaaaatatttgcaaaatattataatgtagaagaagaagttgcacttagaactatctataagaagactgttggagaaggtagaactcttacttggaaagttacaggtgaagaatataaaaataatttacaaatgtataaagatttaaaggctttagatgatatacctaaatatgaagatacgattgatacaagcttattggactcttgtggagctgatgattttgacaaatttataaaagaaaaagttaacccagagtttcctgaaggtatgagttatgaagactggaaagcaaaggtatta

SEQ ID NO: 151 - protein, 340 aa, Clostridium difficile
CSSKPKEKEEAKTGKDDYTITVGYYNCDHMTAGPVAESAGIYKDLGLNVKTVGNGKVPEAMAAGKMDAGYIGTKGLVGAIPKGSPITIAANNHTGGSEYLIVSKDIKEPKDLIGKKIATDMSDFLWTSDYGPETGLPTDPSKYEVVNMDSDKDKYLALKTGKIQAFTSCDPWGSVAENDGAGKIIASTQYKEKANGKEYNCCSFSLNKNFIKEHPDLAKKLVLAHTKAIEYIYTNPAEAAKIFAKYYNVEEEVALRTIYKKTVGEGRTLTWKVTGEEYKNNLQMYKDLKALDDIPKYEDTIDTSLLDSCGADDFDKFIKEKVNPEFPEGMSYEDWKAKVL

SEQ ID NO: 152 - DNA, 1203 bp, Clostridium difficile
tgttcaaaaaaagaagattctaaaggcaaagagggtaaagaaaaattagttgtatggtctgcaccattaacagaccatgatgcagatgcatggaagccgatatttgaaaaatttgaaaaagaaaataactgtgaaattgaatttcagatagtaccatgggataactacgcagaaaaatatgcaacagcaataagtgcaggtgaaggtccagatataggatacatgtatgcagagatgtttcctcaatttatagaaatgggtgcggtagaagatttaacaccttatttagaaaaatcaggaacttcagataattatctatacttagatgatgcaaaaatgatgggtggtatttatggtttacctatagaagctgctaatccaggcgtattgtactacaataaagatatactagaaaaattaggagaaaaacctccaaaaacatgggatgattttaaaagaatctgtgaaaaagcaacaaaagatactgatggagatggaaaaatcgaccagtggggtcttgcacaaggttggggttctaaagtatttggaagcttaaactggaactggtatccgtatttatggcaagctggtggagatatatataatgatgatttaaaatcagttaaatttaataatgcagaaggcttgaaagctgcaaactttataaatgatatgaaaaagtatattccagaagatgctttatcaaaagatagtaatgaaatgattgaaagtgtatttggaccaggaaaagctgcatttactataatgctatcctctgctgctacaagtacttttgataaatcattcccggatttaaactggggatatgtaacatcattagaagataagacagttggaagttttgcttcagtagatgatttaacattaatgtcagcatgtaaaaataaagaacttggatttaaacttcttgagtatatgctaagcaaagaatcaatggaagctttccacaaagaaatacctagagctccagttgctaaaggtgaaaaataccaaggagacccaagatttgaagaaatggtgacaagagataaacatatgtatagaccattgacagttggacctcatggagtagagatatatgaatatttatggaaacaacttcaaatgatgatagctggagacataactccagaacaagcactaaatgaatctgcaaaatatgcaaatggattactagcacaa

SEQ ID NO: 153 - protein, 401 aa, Clostridium difficile
CSKKEDSKGKEGKEKLVVWSAPLTDHDADAWKPIFEKFEKENNCEIEFQIVPWDNYAEKYATAISAGEGPDIGYMYAEMFPQFIEMGAVEDLTPYLEKSGTSDNYLYLDDAKMMGGIYGLPIEAANPGVLYYNKDILEKLGEKPPKTWDDFKRICEKATKDTDGDGKIDQWGLAQGWGSKVFGSLNWNWYPYLWQAGGDIYNDDLKSVKFNNAEGLKAANFINDMKKYIPEDALSKDSNEMIESVFGPGKAAFTIMLSSAATSTFDKSFPDLNWGYVTSLEDKTVGSFASVDDLTLMSACKNKELGFKLLEYMLSKESMEAFHKEIPRAPVAKGEKYQGDPRFEEMVTRDKHMYRPLTVGPHGVEIYEYLWKQLQMMIAGDITPEQALNESAKYANGLLAQ

SEQ ID NO: 154 - DNA, 885 bp, Clostridium difficile
aatcccaaaagagagttgatagaagggagtataccagagatttcgacagaattaaataaaagagcatttaaggattctaaagaagtaattcttgtaaatgaagagtcaattgtagatagtataagtgcaacacctttagcatattcaaaaaatgctccaatagttgtaactaagagtaaaaatcttggtagagtaacaagaaattatctaaaagaactaggtccagagaaggttacgatagtaggtggtttaaaggcagtatctaaagatgctgaacgtaatatagaaaaaatgggaatgaaagtagaaagaataagagggaaagacagatatgatacatctttaaagatagctagagaaatgtatagaacagtaggatttgatgaagcatttttacttagctcaacaacaggattagagaacgccatatctgtatattcttatgccgctaaaagtggaatgccaataatatgggctaaagatgaagggtttgaggaacaaattgatttcttaaaaggcaagaatcttaaaaaaatatatgcattaggtgattcaaaagaatttattgcagagattgattctaacttaaaaaatatagaaggaataaagcaaataaataagtcaagtacaaatgttgatttaataaagaagttttatgatgaaaaagatataaagaaaatctatactgctagattagactttggtagtagatctgatgtaaacgaatatatttctttgggagtagtatcagcaaaagaaaatatgccaatactgatttgtagtgataacttaagtcgtgcacaagataaattcttgaaagatagcaatataaatgatgtagttgaagttgggtatacagtaggtgattatagtctatttaagagc

SEQ ID NO: 155 - protein, 295 aa, Clostridium difficile
NPKRELIEGSIPEISTELNKRAFKDSKEVILVNEESIVDSISATPLAYSKNAPIVVTKSKNLGRVTRNYLKELGPEKVTIVGGLKAVSKDAERNIEKMGMKVERIRGKDRYDTSLKIAREMYRTVGFDEAFLLSSTTGLENAISVYSYAAKSGMPIIWAKDEGFEEQIDFLKGKNLKKIYALGDSKEFIAEIDSNLKNIEGIKQINKSSTNVDLIKKFYDEKDIKKIYTARLDFGSRSDVNEYISLGVVSAKENMPILICSDNLSRAQDKFLKDSNINDVVEVGYTVGDYSLFKS

SEQ ID NO: 156 - DNA, 1641 bp, Clostridium difficile; identical to SEQ ID NO: 96

SEQ ID NO: 157 - protein, 547 aa, Clostridium difficile; identical to SEQ ID NO: 97

SEQ ID NO: 158 - DNA, 1248 bp, Clostridium difficile; identical to SEQ ID NO: 98

SEQ ID NO: 159 - protein, 416 aa, Clostridium difficile; identical to SEQ ID NO: 99

SEQ ID NO: 160 - DNA, 1413 bp, Clostridium difficile; identical to SEQ ID NO: 100

SEQ ID NO: 161 - protein, 471 aa, Clostridium difficile; identical to SEQ ID NO: 101

SEQ ID NO: 162 - DNA, 3306 bp, Clostridium difficile; identical to SEQ ID NO: 102

SEQ ID NO: 163 - protein, 1102 aa, Clostridium difficile; identical to SEQ ID NO: 103

SEQ ID NO: 164 - DNA, 1941 bp, Clostridium difficile
actgaatctaatgctatggaaaataacgctgatttaaatataaacttagagaaaaaaagtatcgttttaggtagtacctcaaaagtcagtgttaagtttaaagaaaaaccagatgcagatagcattacattaaagtataaatgctatgatatgccattggatacaactttaaactacaatcaatcaactgagtcatatgaaggaactatcaattataataaagacccagaatatctaaatgtttgggaactacaagggataacaataaacagcaaaaataatcctaaaactttaaacaaacaagaactagaaaagatgggattaaatttaaaagactataatgtaacacaggaatgtataattgaagatataacttctagaaaagatgtaaataaatatttaagaaaaacttctgcacctattacagaacttacaggaagtgatagatacgaaacagcagttaaaataagtaaagaaggctggaaaaatggttcagataaggtagttataataaatggggatgtaagtatagatggcattatatcaactccactagcaactacatataatgctccaatacttttggttgaaaaaaacaatgtacctaatagtgtaaaatcagaattaaagcgtttaaatcctagagatgtaattataattggagatgagaatgctatttctaaaactactgctaatcaaattaaatcgactgtaaatgctagtcaaacacgtctaaagggctctaatagatatgagacatctttattgatagcaaaggaaatagataaaaatcatgatgtggaaaaagtatacataacaaatgctaatggcggagaagtggatgcacttactatagcagcaaaagcaggtcaagacaagcaaccaattatattaactgataaaaatagtattacagacaatacatataaatggttaaagagtgaggatttacaaaatgcttattttataggtggccctcaaatgatatcaacaaatgttataaataaggtaaatgatataactaaagataatgttactaataatagagtatatggagcagatagacacgaaacaaatgcaaacgtaataaaaaaattctatacagatgatgagttagaggctgttttagtagctaaatcagatgtacttgttgatgctttagcagcaggtccattggctgcgaacttaaaatctccaatacttataacaccaaagacatatgtatctgcataccataaagaaaacttagaagctaaatcggcaaataaggtatataaaataggtggaggattgacttctaaggtaatgagctctatagcatcatcattatctaaacacaatacgactccaacagaaccaggaaatagtgggggcaagacagttatgattgacccaggacatggtggttcggacactggaacaacaggtaaaccattagggggtattagagaaaaagactatacattaaatacttcacttgcgacaactgaatatttacgttcaaagggattcaatgtaataatgacaagagacacagataagactttatctcttggaaatagaactgctttatctaactctttgagaccagatttatttacgagtatacactataatgcatctgatacaactgggaatggtgtagaagtattttataagcttaaagataaagatggaggaactactaagactgtagctacaaatatattaaatagaattttagagaaatttaatctaaaaaatagaggtgcaaaaacaagaacactatcaactgaccctacaaaagattatttatatgttttaagaaataatgatatgccagctgtacttgtagaatgtgcatttttggataatgagaaagatatgagtttacttaatacatcaaataaagtaaaagaaatgggtacacaaataggtaaaggcatagaagattcattaaaa

SEQ ID NO: 165 - protein, 647 aa, Clostridium difficile
TESNAMENNADLNINLEKKSIVLGSTSKVSVKFKEKPDADSITLKYKCYDMPLDTTLNYNQSTESYEGTINYNKDPEYLNVWELQGITINSKNNPKTLNKQELEKMGLNLKDYNVTQECIIEDITSRKDVNKYLRKTSAPITELTGSDRYETAVKISKEGWKNGSDKVVIINGDVSIDGIISTPLATTYNAPILLVEKNNVPNSVKSELKRLNPRDVIIIGDENAISKTTANQIKSTVNASQTRLKGSNRYETSLLIAKEIDKNHDVEKVYITNANGGEVDALTIAAKAGQDKQPIILTDKNSITDNTYKWLKSEDLQNAYFIGGPQMISTNVINKVNDITKDNVTNNRVYGADRHETNANVIKKFYTDDELEAVLVAKSDVLVDALAAGPLAANLKSPILITPKTYVSAYHKENLEAKSANKVYKIGGGLTSKVMSSIASSLSKHNTTPTEPGNSGGKTVMIDPGHGGSDTGTTGKPLGGIREKDYTLNTSLATTEYLRSKGFNVIMTRDTDKTLSLGNRTALSNSLRPDLFTSIHYNASDTTGNGVEVFYKLKDKDGGTTKTVATNILNRILEKFNLKNRGAKTRTLSTDPTKDYLYVLRNNDMPAVLVECAFLDNEKDMSLLNTSNKVKEMGTQIGKGIEDSLK

SEQ ID NO: 166 - DNA, 1656 bp, Clostridium difficile
tgtagtaatactaaaacaaaacaaagtagtagtgattcaagtttacaaagtcaaagttcgatagatgctaagtatataaacttaacaatggtaactccaaaaactataaatcctataactaatactgataagtctgttggttatataatgaatttagtttatgatagtttatttactatagatgagaactacaatgtaattcctcaattagttaaggagtataatatagctcaggatggaatgagtatagatataaagctaaaagatgcaaagtggcatgatggaaaaaatgttacttcaaatgatgtaaactatactattggtttaattcaaaaaagtgcagatagtccatataatgaatttactaaaaatatagcttctgtgaatattaaatcagataaagattttacaataaaatttaaagctagatatgctttttcaattgatagtttaatttttccaattgtatctcaaaatcatttagattcaaaagatgtaaatgacaagaataataatatgataggaaatgggaaatataaaatagaatcatatacagaaagagaaggaatggttttatctgtaaacaaagattactatgaagaagttccaaaaaccatgaagaacataaaagtaggtatggtgcctaatgaagatgcaaggacatctatggttatggctcttgatagtgatataaccaatgttacattaaatgatttaagtaagtttcaagaaaaagagtttaatataacaaaatatcaaggaagagattatgagtgtgtattatttaattataataatccttttttcaaagatgttaattttagaaaagcaattgcacactctatagataaagatagaattattagtgaaggttatatggatgatgctactccagttaattttccacttaattcaaaatcaaaatactataatagtgaaatgaaggatttagagtttaataaagataaggcgatagagtgtcttgctaaggtagaatatgcaaatgtaaactcagtaaatcaaaatgacaataaagtaaaaaatcagaaaaaatcagctaaaaagaactcaaagaagcttacgccagaagaagaagcaaaagctaaaaaagcagaagaagatagaatcaaaaaagaagctgaagagaaaaaaaatagagaaaaagaggaagtaaagaaaagtctttctgaaatgaacttaaagataatagtaaacagagataatagtgagagaataaaaactgcaaacataataaatgaaaacttaaaagctataggaataaatagtacagtaaatcagctgtcagataaggatatggaaaatgctcttaattctaaaaattatgatttagcattagttggatggaaactatcaattataccagatgcaagtagtattatagcgagtagtggatatactgatgataagttaaatggatatatgtctgcacttacaagttctacgtctgaaattgaaacaaaaaaagcatacaaagatgtacagacatatataaaagataatgcaacatttataagtttagctgtgagaaacaactatattgtaagtaatagtagattaaaaggtaaaattactccaaatgattttgatgtatatgagggaatatctaatttagatataaaatcgaatgaatcaaat

SEQ ID NO: 167 - protein, 552 aa, Clostridium difficile
CSNTKTKQSSSDSSLQSQSSIDAKYINLTMVTPKTINPITNTDKSVGYIMNLVYDSLFTIDENYNVIPQLVKEYNIAQDGMSIDIKLKDAKWHDGKNVTSNDVNYTIGLIQKSADSPYNEFTKNIASVNIKSDKDFTIKFKARYAFSIDSLIFPIVSQNHLDSKDVNDKNNNMIGNGKYKIESYTEREGMVLSVNKDYYEEVPKTMKNIKVGMVPNEDARTSMVMALDSDITNVTLNDLSKFQEKEFNITKYQGRDYECVLFNYNNPFFKDVNFRKAIAHSIDKDRIISEGYMDDATPVNFPLNSKSKYYNSEMKDLEFNKDKAIECLAKVEYANVNSVNQNDNKVKNQKKSAKKNSKKLTPEEEAKAKKAEEDRIKKEAEEKKNREKEEVKKSLSEMNLKIIVNRDNSERIKTANIINENLKAIGINSTVNQLSDKDMENALNSKNYDLALVGWKLSIIPDASSIIASSGYTDDKLNGYMSALTSSTSEIETKKAYKDVQTYIKDNATFISLAVRNNYIVSNSRLKGKITPNDFDVYEGISNLDIKSNESN

SEQ ID NO: 168 - DNA, 1293 bp, Clostridium difficile
cttgaaacaatttatactattcaaggaaaagataaatacgaaacggctgctcttatagctgatgaacaaaattatactacagctatattaattaatgcagacagcacaatggctgatggattaagtgcgagtggacttgcaggagcaacaaatgcaccaatttttttaactaagaaaaataacatacctaatgcaactcttaaaagagtagagaaagctaaaaaggtatacataataggtggagaaagttctattgataaagcaacagaaactcttctaaaagataaaggaatagaggctaaaagacttcaaggtagtgatagaattaagacaagctataatgttgcaaaagaaataaactcaattaacaaagtaaataaagttatattgactaatgcttttaaaggagagcctgatgcaatgagtgctgcacctgtagcagttagagataaagcagctatagtattaactgatggaaaaagtgttccatttaatacaactggtgtagaaagttatgtaataggtggtacttcatcaatgagtgacaaactagttaatgatactaattcaactagattaggtggagtagatagatatgatactaataaaaaaatagtaaataagttctataatggcgcaaaagaattttatatagctagtggtactgatttagtttatgctttagttgcttcaccaatggctaaaaataatcctattgtactagttgatattggaagtaataaagatatacttaaaaatgctgcaaaagtgactgggataggaaatctaagtgataaaattatgctagagtgtgaaaataccatcaataatattagtcttccatcttcaaataaaaatataatatgtggattaaagattgattttgattcaaatcacataatttggcaagataaaggaagttatcttgaatgttatgatgataaccttgaatattatactgaaaaatataaagacccaacagttcctataaatatagaaaatacaagtacgcaaaatttagatgtaacaaaattaaaagtttatggagaagctaattcaacattatatatggggcaatacgctaaaataaaaatggattttaatagttttggtgtattaaagccaggagaaaaatgtactatttatttagatataatttcattagatccatcaagaagcatgacattaacattttcttatgtaggtgataaagaaaattataaatatgaacaaggattggtaagtagaatattattttataacccagatggagaagatttttttgaatataaa

SEQ ID NO: 169 - protein, 431 aa, Clostridium difficile
LETIYTIQGKDKYETAALIADEQNYTTAILINADSTMADGLSASGLAGATNAPIFLTKKNNIPNATLKRVEKAKKVYIIGGESSIDKATETLLKDKGIEAKRLQGSDRIKTSYNVAKEINSINKVNKVILTNAFKGEPDAMSAAPVAVRDKAAIVLTDGKSVPFNTTGVESYVIGGTSSMSDKLVNDTNSTRLGGVDRYDTNKKIVNKFYNGAKEFYIASGTDLVYALVASPMAKNNPIVLVDIGSNKDILKNAAKVTGIGNLSDKIMLECENTINNISLPSSNKNIICGLKIDFDSNHIIWQDKGSYLECYDDNLEYYTEKYKDPTVPINIENTSTQNLDVTKLKVYGEANSTLYMGQYAKIKMDFNSFGVLKPGEKCTIYLDIISLDPSRSMTLTFSYVGDKENYKYEQGLVSRILFYNPDGEDFFEYK

SEQ ID NO: 170 - DNA, 1347 bp, Clostridium difficile; identical to SEQ ID NO: 110

SEQ ID NO: 171 - protein, 449 aa, Clostridium difficile; identical to SEQ ID NO: 111

SEQ ID NO: 172 - DNA, 1374 bp, Clostridium difficile; identical to SEQ ID NO: 112

SEQ ID NO: 173 - protein, 458 aa, Clostridium difficile; identical to SEQ ID NO: 113

SEQ ID NO: 174 - DNA, 2442 bp, Clostridium difficile
tcaaatactttcgcagatactatagaagaaagtactaatgcaggaaatgcagaaggagatactaatgcaggaaatgcaggaggggatgctaatgcaggaaatgcaggaggggatgctaatgcaggaaatgcaggaggggatgctaatgcaggaaatgcaggaggggatgctaatgcaggaaatgcagaagaagattctaatgcaggaaatgcagaaggagatgctaatgcaggaaatgcagaagaagatgctaatgcaggaaatgcagaagaagattctaatgcaggaaatgcagaagaagatatgaatgcattagttgtggaagaagccactgcagaagatcctacatctgtaggagactttaaaattagtggtggagaaataaatgtcgattttaaatttgcaagtggcgttttaactattcttagtggaaaacaaatgacaattcaaaataataatccaaatactccaacaacacataggattgttatacctaaagatgtaaaagctgaattaatatttgatggagtaaatattaaaactgcatctaatagcccatttactttaacaccagataaagatggtggtgcatatgcacatgttatattacaagatggtagtgaaaacaagctagagtcaggtgatgtatattatccaggtatgagagcaggaaaaggtactactctaactattgatgattctgttgtaaatagagatattgaaggagagtttatagttcctgagggtggaaaaattcctagagatgtaactctagaaaatggagacaagttaaaaaaaggagatcgccttacactactagatagtaataatagaggaagtttaaaagttgttggaaattattattctgcaggtattggcggtggaaatactgaaagtggaggaaatattattattaatggtggtgctataactgctataggtcaagaatcgagtcgtaatacaggatatggagctggaataggtggaggcggtaatggtagtggtggagatatcacaatcaatggtggtactataactgctaaaggtgcataccatggagctggaataggtggaggatactatacaacaacaaagaatgcattaagtccctcagtagtagatcctagcacaggttctggttatagtggaaatattacaattaatggtggactttcctattcatatggaggtgcacatggtagtgcatttggggatggatgtgttaatccaggaacaaatagaggatatcgtatacttgtaactggaggaacgattttaccttatatgacaggagtgggagattggatttttgacctaagtgctacaacaggagatgttatagtaacaggtggttcattaaaagcaacaacattcaaaagtttaggtggagcagttgcatacggtgatttagaaaagaaaacaaaagtttttatgaataaaatatctttaaagtatttaggacaagataaagttagtactacattagttgatgattttaaaatgctaattgatggaaaaatttatccttatggagcacctagttatacagatgatcaaggggttctttacttatggttttctgatcaatttaagggatctgaagtatctgttaatttagttgttatagataaaattactggaggaaatataaaaccagatgatttttatgttaaagatataggttcaggttctcaatttttaaagcaatatgaagaatttactattgatgatactccaccatatttgattattaaaagatatgatggattaccatttgaagaagatgtagaaaaattatttttagattggatattaaaagatgggggtattccaataattactcctaaaggtgaaaaactcacagataaaaaatttatgactattagttctcaacgtttaaatgaggaaacaatggaaccagatacaaatttaggaagtgatgaccttacaaagcaagttgatgctggaaaatatcaattaagcattacatcaacacagttttcaaatgtatatccttttaatgaagcttattgggggcatagagcatattataaggcagaaattattcctgctgatacagaaacttcattagttgtagaagagtctaaagctaaaactgatgtttttaaaccaacagatacgtttacattaaatgttactatttcaccagataagaaagaaggaacagattgtgcctctccaagaggttacgtacaattctatattaatggaaaggaatataaagatccagtagaattaaaaactcataataagggtagtgagagtcataattatagtactgcatctattgaatggagacctttagatagcaatcatcatatttttactactgaacaaactattactgtaaaatatattggagatgatataaattacattgaaggtagtgaggatgaaaagaagttaaagttagatatgaca

SEQ ID NO: 175 - protein, 814 aa, Clostridium difficile
SNTFADTIEESTNAGNAEGDTNAGNAGGDANAGNAGGDANAGNAGGDANAGNAGGDANAGNAEEDSNAGNAEGDANAGNAEEDANAGNAEEDSNAGNAEEDMNALVVEEATAEDPTSVGDFKISGGEINVDFKFASGVLTILSGKQMTIQNNNPNTPTTHRIVIPKDVKAELIFDGVNIKTASNSPFTLTPDKDGGAYAHVILQDGSENKLESGDVYYPGMRAGKGTTLTIDDSVVNRDIEGEFIVPEGGKIPRDVTLENGDKLKKGDRLTLLDSNNRGSLKVVGNYYSAGIGGGNTESGGNIIINGGAITAIGQESSRNTGYGAGIGGGGNGSGGDITINGGTITAKGAYHGAGIGGGYYTTTKNALSPSVVDPSTGSGYSGNITINGGLSYSYGGAHGSAFGDGCVNPGTNRGYRILVTGGTILPYMTGVGDWIFDLSATTGDVIVTGGSLKATTFKSLGGAVAYGDLEKKTKVFMNKISLKYLGQDKVSTTLVDDFKMLIDGKIYPYGAPSYTDDQGVLYLWFSDQFKGSEVSVNLVVIDKITGGNIKPDDFYVKDIGSGSQFLKQYEEFTIDDTPPYLIIKRYDGLPFEEDVEKLFLDWILKDGGIPIITPKGEKLTDKKFMTISSQRLNEETMEPDTNLGSDDLTKQVDAGKYQLSITSTQFSNVYPFNEAYWGHRAYYKAEIIPADTETSLVVEESKAKTDVFKPTDTFTLNVTISPDKKEGTDCASPRGYVQFYINGKEYKDPVELKTHNKGSESHNYSTASIEWRPLDSNHHIFTTEQTITVKYIGDDINYIEGSEDEKKLKLDMT

SEQ ID NO: 176 - DNA, 1578 bp, Clostridium difficile
gacaatactacaaagcaagaaagattaataggtaaaacaagatatgaaacagcagtagaagtaagtaaattgggatgggttcaatcaaaaacagccattatagttaatggtaattctattcaaagtgcgctttgtgcaaatccatttgctaagctaaagaatgcacctatacttttagtaaacaacaacagtattgaaaattcaactaaggctgagcttaaaaggcttggtgtagataatgtgtacattgtagatagtggaaatagcatttcttctaaagtagaaaatgaaataaaatcacttaacataaaaataaataaaatagtaggaaacaatatatatgaaatgtctacaaatgtacttaaagaaatagataagataaaaaagatagaaaatgttgcagttgtaaatggactaaagggactatctgatgcagttagtatagcttctccagcagcaatacataatatgcctataatattagtatcagatgaaaacagcaatgatagtagtataaatttcttaaacaataggtctataaaaaaatcttacatagttggaggaaataagattttatcagacaatacagtaaagaaatatccaaacagagaaagaatcagtggttcagatagaaacaatactaatgcaaaaattattgataaattttataaagataaaaaaataaataatgtatttgtagctaaagatggtattaaccaagaaaatgcattagtagattcattatcaataggagtactagctgctaaagaaaattctcctataatgatatctaatggtagccttgtaaatagtcaaaaagaatttattaaaaataaagatatagatgaaataacacaagtaggaggaggatataatcaaaaagcatttgaagatattttaaaactaaaaaatgtgaacataagaaataaaactaaaaaaatatctttaatacaggctaaagaaatattaaaacaagctcttccaggaagcaatattttagtttgttattatgatgaagatgataatgaatatgactgcaaagttataaaggataatatcctatatgagatagaaattgatgcctactctggtaaaataatagaaattgaaaaagatgatgacttaaatgataataatttaggtacacaaaatatatcattggataaagctaagtctatagcattagatgctgttcctaatggtaatttaatctattgtaaatatgatgctgaagataacgaatacgaggctaaagtaataaaaaataagaaaacatatgaattagagataagtgcatttgatggaagaattgtagatattgacatggacaatgattctgatgatgactttgatgataatgataagaataactctaatactaatgacaacagttctattattagtgctgaaaaagctaaatcaataatgctagataaagtgcctggtgggaaaatagtaaaatttaagtatgatgaagatgacaaagaatatgaaggtgaaataataaaaggaaaaactgaatatgagataacaattaatgcaattactggtaaaatattagaatttgaaatagatgat

SEQ ID NO: 177 - protein, 526 aa, Clostridium difficile
DNTTKQERLIGKTRYETAVEVSKLGWVQSKTAIIVNGNSIQSALCANPFAKLKNAPILLVNNNSIENSTKAELKRLGVDNVYIVDSGNSISSKVENEIKSLNIKINKIVGNNIYEMSTNVLKEIDKIKKIENVAVVNGLKGLSDAVSIASPAAIHNMPIILVSDENSNDSSINFLNNRSIKKSYIVGGNKILSDNTVKKYPNRERISGSDRNNTNAKIIDKFYKDKKINNVFVAKDGINQENALVDSLSIGVLAAKENSPIMISNGSLVNSQKEFIKNKDIDEITQVGGGYNQKAFEDILKLKNVNIRNKTKKISLIQAKEILKQALPGSNILVCYYDEDDNEYDCKVIKDNILYEIEIDAYSGKIIEIEKDDDLNDNNLGTQNISLDKAKSIALDAVPNGNLIYCKYDAEDNEYEAKVIKNKKTYELEISAFDGRIVDIDMDNDSDDDFDDNDKNNSNTNDNSSIISAEKAKSIMLDKVPGGKIVKFKYDEDDKEYEGEIIKGKTEYEITINAITGKILEFEIDD

SEQ ID NO: 178 - DNA, 2013 bp, Clostridium difficile
tttacaccaatagtatcttatgctgacgaagtgactagcaatgatacaatacttaatggagaagaacaatcaaatggtcagacaccagatgtagagaaaccatcagacggtcaggtaccaggtggggagaaaccatcagacagtcaagtaccagatggggagaaaccatcagacggtcaggtaccagatggggagaaaccatcagatggtcagataccagatggggagaaaccatcagatggtcagataccagatggagagaaaccatcagatggtcagataccagatggggagaaaccatcagatggtcagatgccagatggagagaagacatcagatagtcagacgccagatgtagagaaaccatcagatggtcagatgccagatggggagaaaccattagatgagcaaactccagaagaagaaaaaccattggaagaagaaatagttatagaggaaatgagtttaaaacaagatattgataaaattcttgatatgactttatctcaaataaataaaatagtatataacttttgggaagatgaagaagatgtaaaggcagatgaacaatcagaaattaaccaagtttttacttcagaagactcatttattagcttatggtatgacaaaaaagcaaaagtaaaaaattcttgtttactaaaagaaatagatggttcagatagaccttatcatgatttaagatttgatgatattacaaagactttaacttttgactatgtaataaagggtcttgtaggagcaagctcaaaagacgacaaatatgtaatagaaggtgaagatggagagcaaactgcattttgttacaataatcatttaagaccaccaagtagtaatggaaagagtccatatttaccagcagaagattttaatggtcaagaaaaccaaaatgaagaagcagttaaatctatactatatgcaggttctgaatttgatggatttggatataagcaacaatttaatttaggtggagaagaaaatgaattgatgacttactcagctactcaaagtgcaatttggattattcttggacaaatggatgaacaagaaagacttaagcagtatcaaggttctataaacctttgtgataaacttatagaaagagcaaaaactgaagaggaaagagctgagtatcagaagaagaaagaagtagcgataaatataaaagcttatttagaagcattgttaaaagcaggtcgtgaagagttaaagccaaataatacaggaaaacctagtttgagtaatggtttaactaagattaactttgaaaaaaatgaagatggtacttatgaaacagaagctgtagccttagtaggttatagtggtgtagtaaagttaagactaccagatggagtaactgcttatgatgtagatggtaatataataggtacaggcgaagtagaaatttcaacgcaacagaaatttaaacttaagagtgttggaaaaccagatgccaaagctaatatttctgctgtatcttatgattatatttttccaaaagctattcaatattataaggcagtgcttgatttaggacaaaaagaccattcatcttcattaccatctagcaagcaaaatttattaagttatacaatagagaaaaagaatggtcaagaagttaactttaatataggtttaccaacagatgatgatgatgttgtaaatccaccagtgccaccaatagatgatgatgttgtaaatccaccggtgccaccaacagatgatacaaatggacataagccaaaaccatcaccaccaatagatgatacagtaataaatccaccagtaccaccaatggatgatacaataataaatccaccagtaccaccaacggaggatgcagtgttaaacccaccagtgccaccaatggaggatgcagtgctaaatccaccagtgccaccaacagatgatacagtgttaaatccaccagtaccaccagtaagtgatacagtggaaaaaactccagaactatcaagagatgatacaatagtaaaa

SEQ ID NO: 179 - protein, 671 aa, Clostridium difficile
FTPIVSYADEVTSNDTILNGEEQSNGQTPDVEKPSDGQVPGGEKPSDSQVPDGEKPSDGQVPDGEKPSDGQIPDGEKPSDGQIPDGEKPSDGQIPDGEKPSDGQMPDGEKTSDSQTPDVEKPSDGQMPDGEKPLDEQTPEEEKPLEEEIVIEEMSLKQDIDKILDMTLSQINKIVYNFWEDEEDVKADEQSEINQVFTSEDSFISLWYDKKAKVKNSCLLKEIDGSDRPYHDLRFDDITKTLTFDYVIKGLVGASSKDDKYVIEGEDGEQTAFCYNNHLRPPSSNGKSPYLPAEDFNGQENQNEEAVKSILYAGSEFDGFGYKQQFNLGGEENELMTYSATQSAIWIILGQMDEQERLKQYQGSINLCDKLIERAKTEEERAEYQKKKEVAINIKAYLEALLKAGREELKPNNTGKPSLSNGLTKINFEKNEDGTYETEAVALVGYSGVVKLRLPDGVTAYDVDGNIIGTGEVEISTQQKFKLKSVGKPDAKANISAVSYDYIFPKAIQYYKAVLDLGQKDHSSSLPSSKQNLLSYTIEKKNGQEVNFNIGLPTDDDDVVNPPVPPIDDDVVNPPVPPTDDTNGHKPKPSPPIDDTVINPPVPPMDDTIINPPVPPTEDAVLNPPVPPMEDAVLNPPVPPTDDTVLNPPVPPVSDTVEKTPELSRDDTIVK

SEQ ID NO: 180 - DNA, 891 bp, Clostridium difficile
cattcaggaagaactgattcatcaggaggtcatcgtgataataaaaataaatctggattaggaagttatcactatcattgtggtggttatccagctcatttacataataatggtggttgtccttatactggaggaggaagcagttctggaacagcaacttcggttaataatgaagaaaagcaaaagaggtctgttggagaaaaaggatataatcaagggtatgaagatgggtataaaggaaattatagttcatcaaattatagtggagattatagtgatacatatgaatcaaagtactcagaaggatatgaaaaaggtaaggctaaattagaagaggaagaaaaggtggctaaagagactggatataatttagggcttacaggtgctaaatctaataatacatatgaaaaagaagttttaaaaaatgcttatgataccggatattcaactggatacaatgaatataagactaaaaagatagaagaatataaagctaaagggatagaggatagcaataaagataaggaaaaaatgacatttgaagaaaacatagattctgaatttatagatgcttataataatgcttatgacgaaatacaagaacaattaaaaaatgattacactactcaaggatttgagagtgctatcaaaggagaaagatttgacacatcaactataggtaatgttaaatatgctaattggtttaaagaaggatatgataatggtaaggttaagttacctaaagcaaaagaaagtgtatataatcaaggttacaatgaagaagattttagtataccagatgaaatgaagtctattgaaactaagttaaaaggtgtatatgatgaaggtttagaaaaaagagaggaagagaaaagtagaaatgctacttat

SEQ ID NO: 181 - protein, 297 aa, Clostridium difficile
HSGRTDSSGGHRDNKNKSGLGSYHYHCGGYPAHLHNNGGCPYTGGGSSSGTATSVNNEEKQKRSVGEKGYNQGYEDGYKGNYSSSNYSGDYSDTYESKYSEGYEKGKAKLEEEEKVAKETGYNLGLTGAKSNNTYEKEVLKNAYDTGYSTGYNEYKTKKIEEYKAKGIEDSNKDKEKMTFEENIDSEFIDAYNNAYDEIQEQLKNDYTTQGFESAIKGERFDTSTIGNVKYANWFKEGYDNGKVKLPKAKESVYNQGYNEEDFSIPDEMKSIETKLKGVYDEGLEKREEEKSRNATY

SEQ ID NO: 182 - DNA, 1746 bp, Clostridium difficile
tatagtacatctagcaacaaaagtgttgatttatatagtgatgtatatattgaaaaatattttaacagagacaaggttatggaagttaatatagagatagatgaaagtgacttgaaggatatgaatgaaaatgctataaaagaagaatttaaggttgcaaaagtaactgtagatggagatacatatggaaacgtaggtataagaactaaaggaaattcaagtcttatatctgtagcaaatagtgatagtgatagatacagctataagattaattttgataagtataatactagtcaaagtatggaagggcttactcaattaaatcttaataactgttactctgacccatcttatatgagagagtttttaacatatagtatttgcgaggaaatgggattagcgactccagaatttgcatatgctaaagtctctataaatggcgaatatcatggtttgtatttggcagtagaaggattaaaagagtcttatcttgaaaataattttggtaatgtaactggagacttatataagtcagatgaaggaagctcgttgcaatataaaggagatgacccagaaagttactcaaacttaatcgttgaaagtgataaaaagacagctgattggtctaaaattacaaaactattaaaatctttggatacaggtgaagatattgaaaaatatcttgatgtagattctgtccttaaaaatatagcaataaatacagctttattaaaccttgatagctatcaagggagttttgcccataactattatttatatgagcaagatggagtattttctatgttaccatgggattttaatatgtcatttggtggatttagtggttttggtggaggtagtcaatctatagcaattgatgaacctacgacaggtaatttagaagatagacctctcatatcctcgttattaaaaaatgagacatacaaaacaaaataccataaatatctggaagagatagtaacaaaatacctagattcagactatttagagaatatgacaacaaaattgcatgacatgatagcatcatatgtaaaagaagacccaacagcattttatacttatgaagaatttgaaaaaaatataacatcttcaattgaagattctagtgataataagggatttggtaataaagggtttgacaacaataactctaataacagtgattctaataataattctaatagtgaaaataagcgctctggaaatcaaagtgatgaaaaagaagttaatgctgaattaacatcaagcgtagtcaaagctaatacagataatgaaactaaaaataaaactacaaatgatagtgaaagtaagaataatacagataaagataaaagtggaaatgataataatcaaaagctagaaggtcctatgggtaaaggaggtaagtcaataccaggggttttggaagttgcagaagatatgagtaaaactataaaatctcaattaagtggagaaacttcttcgacaaagcaaaactctggtgatgaaagttcaagtggaattaaaggtagtgaaaagtttgatgaggatatgagtggtatgccagaaccacctgagggaatggatggtaaaatgccaccaggaatgggtaatatggataagggagatatgaatggtaaaaatggcaatatgaatatggatagaaatcaagataatccaagagaagctggaggttttggcaatagaggaggaggctctgtgagtaaaacaacaacatacttcaaa

SEQ ID NO: 183 - protein, 582 aa, Clostridium difficile
YSTSSNKSVDLYSDVYIEKYFNRDKVMEVNIEIDESDLKDMNENAIKEEFKVAKVTVDGDTYGNVGIRTKGNSSLISVANSDSDRYSYKINFDKYNTSQSMEGLTQLNLNNCYSDPSYMREFLTYSICEEMGLATPEFAYAKVSINGEYHGLYLAVEGLKESYLENNFGNVTGDLYKSDEGSSLQYKGDDPESYSNLIVESDKKTADWSKITKLLKSLDTGEDIEKYLDVDSVLKNIAINTALLNLDSYQGSFAHNYYLYEQDGVFSMLPWDFNMSFGGFSGFGGGSQSIAIDEPTTGNLEDRPLISSLLKNETYKTKYHKYLEEIVTKYLDSDYLENMTTKLHDMIASYVKEDPTAFYTYEEFEKNITSSIEDSSDNKGFGNKGFDNNNSNNSDSNNNSNSENKRSGNQSDEKEVNAELTSSVVKANTDNETKNKTTNDSESKNNTDKDKSGNDNNQKLEGPMGKGGKSIPGVLEVAEDMSKTIKSQLSGETSSTKQNSGDESSSGIKGSEKFDEDMSGMPEPPEGMDGKMPPGMGNMDKGDMNGKNGNMNMDRNQDNPREAGGFGNRGGGSVSKTTTYFK

SEQ ID NO: 184 - DNA, 1935 bp, Clostridium difficile
tacaaagtaaatgctgatgagactaaagttaaaaattataagtttgaaagagatataactattgatggtgttataggaagtaatagtactttttttgaagtaaataaaaattgggatattgaagaagttttattgcatcttaattttagtaagagccaaatattaaatggagatgtttcaagtttaactgtattgataaataatgtaccaataaaatctattaaattaaatgctaagacaaattataaaaatacattagaagtattagttccaaaagattatataattcaaggatataatgaaataaaaataaaaacatacaaaacaatatctgataaaatttgccaggatgattccaatactgggaactggatggttattcacaaagaatcatatatatcaattagatataagcagaaaaaggtggaaaactcaataaatgaatatccgtatccatatgcagaaattgaaaataatcataaattagatacaactatagtagtaccagataatatgactagaggagagactacagcagtgtttaatttggcatcagcatttggaaaaataacaaaaaatgatgatttaaagttagatgttaaattatattcagaaatgaaaaattggtcagatgataatattatatatattggtaaacctgaaaatacagcagaagaaattttggatattttaagtataaaggaacaaaccctattatcttcaaactgtataatcaagcaagtagattcaccatacaataagaataagaagatgatggtggtaattggtagtaatgaagatgatttaataaaggcatcaaatttattaatagaaaatagactttctaatcaagttttatcatcatcagtacttgtaaacaaagagactaatataaaaattaatagggaacaaaaattaaatttaggtcatttaacattaaaagacttaggatattctgactttttgttggaaggagcatttaatcaacaagctttatttgatgtcaaaataccaacgggtaaggtattagatgatggttcaaagattatcttaaatttaagatattctgacaatttagattttgaaaaatctttagttacagtgtctataaatgatgttattgtgggaagtaaaaaattggataggtcacattctaataatgataagttagaattaaaaatacctaaagatatagataataaaaactattatcaagttaaattgacatttaatttgagtataaaaaattcgaattgtgttactagagagagtaataatccttgggcatatgtatcaaataattcttatttggcgttatctacgaaagaaaatgaaaccttatcttttgaaaattatccgtatccatttgttagagatgatgaatttaatgatttaactgtgataatgccagattattcagggtcacaagctatgacctggatgtttagattaggtgttactttaggtgcgaatataaattcacataatggaaatataaatgtaattagaggaaaagaatttagtgacaagtataaggatactaatattgtagtttttggagtgccacataataattctgttataaagatgttaaataataatttaaatataaagttcgataaaaattactccaattttatatcaaatgataagataagctttattgatgattatggaaaaaatatttctaccattcaattaataaaatcaccatataataatcaaaaaaatatcatggtaattagttcaatgaatgaaaaaaacttatatttaggaatggattatttgttgaataaaagtaaagttaatgatttaaaaggagatacattgataattgatgaatacggagaggtagaagatttagcttataatttaaaatctaagaaagaagtaaaagattcaagttggaatatgagtataaataagacaactaaa

SEQ ID NO: 185 - protein, 645 aa, Clostridium difficile
YKVNADETKVKNYKFERDITIDGVIGSNSTFFEVNKNWDIEEVLLHLNFSKSQILNGDVSSLTVLINNVPIKSIKLNAKTNYKNTLEVLVPKDYIIQGYNEIKIKTYKTISDKICQDDSNTGNWMVIHKESYISIRYKQKKVENSINEYPYPYAEIENNHKLDTTIVVPDNMTRGETTAVFNLASAFGKITKNDDLKLDVKLYSEMKNWSDDNIIYIGKPENTAEEILDILSIKEQTLLSSNCIIKQVDSPYNKNKKMMVVIGSNEDDLIKASNLLIENRLSNQVLSSSVLVNKETNIKINREQKLNLGHLTLKDLGYSDFLLEGAFNQQALFDVKIPTGKVLDDGSKIILNLRYSDNLDFEKSLVTVSINDVIVGSKKLDRSHSNNDKLELKIPKDIDNKNYYQVKLTFNLSIKNSNCVTRESNNPWAYVSNNSYLALSTKENETLSFENYPYPFVRDDEFNDLTVIMPDYSGSQAMTWMFRLGVTLGANINSHNGNINVIRGKEFSDKYKDTNIVVFGVPHNNSVIKMLNNNLNIKFDKNYSNFISNDKISFIDDYGKNISTIQLIKSPYNNQKNIMVISSMNEKNLYLGMDYLLNKSKVNDLKGDTLIIDEYGEVEDLAYNLKSKKEVKDSSWNMSINKTTK

SEQ ID NO: 186 - DNA, 573 bp, Clostridium difficile
atgaaaaataagaaaataatgttagtgttaagtatattatctatatctatattcgcagttggttgtactaatgctcaaaatggaagtgattcatctaaaaaagaaactaagagcaatacaaatgttgagcaaccaaaagaagaaaacaatactgaaaaagaggttcctaataacaaagctaaacctactccaaaagaagaaactaaagctcaatcagctactatttactcttttgatgtagataagacagatttaattgaaaataaagttgatttaaataaaattgatgagaacactttatttgaagaacttcaaaaacttaaagttgttccagaatctgcaaaattaaattcatttactacaaaagacattgatggtgtaaaaactggtatattagatgttagctctgactttacaaagtcaaacttaggtagtgatgcagaaactttaatgcttgattcagttgctcgtacttacataaaaaatatgaatgttgaacaaataaaaattactgttgatggttctaattacgaaagtggtcatatagttcttgaagaaggagattacttaaag

SEQ ID NO: 187 - protein, 191 aa, Clostridium difficile
MKNKKIMLVLSILSISIFAVGCTNAQNGSDSSKKETKSNTNVEQPKEENNTEKEVPNNKAKPTPKEETKAQSATIYSFDVDKTDLIENKVDLNKIDENTLFEELQKLKVVPESAKLNSFTTKDIDGVKTGILDVSSDFTKSNLGSDAETLMLDSVARTYIKNMNVEQIKITVDGSNYESGHIVLEEGDYLK

SEQ ID NO: 188 - DNA, 510 bp, Clostridium difficile
tgtactaatgctcaaaatggaagtgattcatctaaaaaagaaactaagagcaatacaaatgttgagcaaccaaaagaagaaaacaatactgaaaaagaggttcctaataacaaagctaaacctactccaaaagaagaaactaaagctcaatcagctactatttactcttttgatgtagataagacagatttaattgaaaataaagttgatttaaataaaattgatgagaacactttatttgaagaacttcaaaaacttaaagttgttccagaatctgcaaaattaaattcatttactacaaaagacattgatggtgtaaaaactggtatattagatgttagctctgactttacaaagtcaaacttaggtagtgatgcagaaactttaatgcttgattcagttgctcgtacttacataaaaaatatgaatgttgaacaaataaaaattactgttgatggttctaattacgaaagtggtcatatagttcttgaagaaggagattacttaaag

SEQ ID NO: 189 - protein, 170 aa, Clostridium difficile
CTNAQNGSDSSKKETKSNTNVEQPKEENNTEKEVPNNKAKPTPKEETKAQSATIYSFDVDKTDLIENKVDLNKIDENTLFEELQKLKVVPESAKLNSFTTKDIDGVKTGILDVSSDFTKSNLGSDAETLMLDSVARTYIKNMNVEQIKITVDGSNYESGHIVLEEGDYLK

SEQ ID NO: 190 - protein, 278 aa, Clostridium difficile
MSSISPVRVTGLSGNFDMEGIIEASMIRDKEKVNKAKQDQQIVKWKQEIYRDIIKESKNLYDKYLNGDSPNSITNKKAYSATRITSSDESIIVAKGSAGAEKINYQFAVSQMAEPAKVTIKLNSSDPIVQQFPPNASGASSLNIGGVNIPISEQDTTSTIVSKINSLCADNDIRASYSEMTGELIISRKQTGSSSDIDLKVIGNDSLAGQIASDNGITFTTDASGTKSAVVYGKNLEADVTDDQGRVTHISKEQNSFKIDNIDYNVNSKGSAKLVSVT

SEQ ID NO: 191 - protein, 229 aa, Clostridium difficile
DTEEATKNMKAFVDDYNALMDKVYGLVTTKKSKDYPPLTDEQKDDMTTEEIEKWEKKAKEGILRNDDELRAFVEDIQSMFFGDADTIIALRKLGISEHENYNKKGQISFNADTFSKALIDDSDKVYKALAGYSSNYDDKGMFEKLKKIVFEYSGSSASKLTKKAGMENSSSASQNVYSKQIAEQERNISRLVEKMNDKEKRLYAKYSALESLLNKYSSQMNYFSQAQGN

SEQ ID NO: 192 - DNA, 1884 bp, Clostridium difficile
gtgttaatgaataaaagaaaatcttttataagaactatagcagtatcaactatggcagtagctgtaactggtagtgctacatgtgcatatgcagctccagttttacaaggaacaaaaacgtatgagaaagtaaatactatagatatatctgtggactcagtagaaaacatagtatattcatttcaagccagtataaaagtacaaggtgaggttgaagtagtagataatgagcagaaagaaaagattacttggtctgataatataaaatctcagataaaaagtggaaatgcaaatgctacttgtagagcagaatacaacaaatcaagtaatacaactacattagatatatacgttacatcaaatgaagatttactagacggaaatagattgaatataggaagaatatctgtaaaaaaatctggcagtaactcaaatgctgactataaagttttaggaaaaggaacaagtgataaaccagctttaaaaattgtaacatataacaacaaaacagtggattatgaaaatataagctctgatgaaggattaatatttacccttattaatgagagtgaagtaaaaccaattggtggaactggttctagtaaaaatgaccctgaaaagtataaggtagagaaaagtgaagcacttgaatatttattaaacaatattaggataaactattctattgttagtaaagaaacacaagaaagtggttcaaatgtaatattaaaacttggattagcacaaaaaacaactaagggaagaaaagctacaataaacaaatatgttgaagttacacttccaaaaagtttagaatacatagttgaaaatgaattatcaaaaccggatgaattaccaccagataatggtagtggtggaaataatggtggaggaagtaattcaggcggctcatctagtggtggaagctctggaggaggaaattcaagtgattctacatctaatgtcacagtcaaaaaattaaaaggtgctgatagatttgagacagctatcaaaatatctcaaagtggttggacaaaatcagatacagttgtaatagtaaatggagaagataaaagtatggtggatgggcttacagctacaccacttgctagtgtaaaaaactcaccgattcttttatcatcaaatgaaaagcttcctcaaaaaactgtagaagaattgaaaaggctaaatccatcaaaagtagttgtgataggtggaaacaactcaatgccaaattcagttgttgaagctatcaaagctgtaaattcaaaaatatcagtacaaagaataggtggagatacaagatatcaaacttctattaatatagcaaaagaaatagataggacgaataatgtgagcaagttgtatataggagcaggaaatggagaagctgattcattatcaatagcatcactggctggtaaagaaaaaactccaatagtacttacacaaaaagatggtgtagataatgaagctgaacaatttattaaatcaaataaggtgtcaaatatatattttattggtggagtagaaaaaatatctaacaaggctattgaacaagttggaaaaatagcaaacaaagatatatcaaacaatagggtggcaggtcaaactagacaagagacgaatgccaaagtaatagataaattctactctcaatctaagctagatggagttgtagttgcaaatcaagacaaacttatagacgctttagcagttggaccattagcagctaaaaacaattcaccagttatacttgctacaaatacgttagataaatcacaagaatcgtcattaaaaggtaaaaattcatcaaagttgtttgaagtaggtggaggaatagcctcatctgtaatagacaagattaagagtttaattgaaaaa

SEQ ID NO: 193 - protein, 628 aa, Clostridium difficile
MLMNKRKSFIRTIAVSTMAVAVTGSATCAYAAPVLQGTKTYEKVNTIDISVDSVENIVYSFQASIKVQGEVEVVDNEQKEKITWSDNIKSQIKSGNANATCRAEYNKSSNTTTLDIYVTSNEDLLDGNRLNIGRISVKKSGSNSNADYKVLGKGTSDKPALKIVTYNNKTVDYENISSDEGLIFTLINESEVKPIGGTGSSKNDPEKYKVEKSEALEYLLNNIRINYSIVSKETQESGSNVILKLGLAQKTTKGRKATINKYVEVTLPKSLEYIVENELSKPDELPPDNGSGGNNGGGSNSGGSSSGGSSGGGNSSDSTSNVTVKKLKGADRFETAIKISQSGWTKSDTVVIVNGEDKSMVDGLTATPLASVKNSPILLSSNEKLPQKTVEELKRLNPSKVVVIGGNNSMPNSVVEAIKAVNSKISVQRIGGDTRYQTSINIAKEIDRTNNVSKLYIGAGNGEADSLSIASLAGKEKTPIVLTQKDGVDNEAEQFIKSNKVSNIYFIGGVEKISNKAIEQVGKIANKDISNNRVAGQTRQETNAKVIDKFYSQSKLDGVVVANQDKLIDALAVGPLAAKNNSPVILATNTLDKSQESSLKGKNSSKLFEVGGGIASSVIDKIKSLIEK

SEQ ID NO: 194 - DNA, 1791 bp, Clostridium difficile
gctccagttttacaaggaacaaaaacgtatgagaaagtaaatactatagatatatctgtggactcagtagaaaacatagtatattcatttcaagccagtataaaagtacaaggtgaggttgaagtagtagataatgagcagaaagaaaagattacttggtctgataatataaaatctcagataaaaagtggaaatgcaaatgctacttgtagagcagaatacaacaaatcaagtaatacaactacattagatatatacgttacatcaaatgaagatttactagacggaaatagattgaatataggaagaatatctgtaaaaaaatctggcagtaactcaaatgctgactataaagttttaggaaaaggaacaagtgataaaccagctttaaaaattgtaacatataacaacaaaacagtggattatgaaaatataagctctgatgaaggattaatatttacccttattaatgagagtgaagtaaaaccaattggtggaactggttctagtaaaaatgaccctgaaaagtataaggtagagaaaagtgaagcacttgaatatttattaaacaatattaggataaactattctattgttagtaaagaaacacaagaaagtggttcaaatgtaatattaaaacttggattagcacaaaaaacaactaagggaagaaaagctacaataaacaaatatgttgaagttacacttccaaaaagtttagaatacatagttgaaaatgaattatcaaaaccggatgaattaccaccagataatggtagtggtggaaataatggtggaggaagtaattcaggcggctcatctagtggtggaagctctggaggaggaaattcaagtgattctacatctaatgtcacagtcaaaaaattaaaaggtgctgatagatttgagacagctatcaaaatatctcaaagtggttggacaaaatcagatacagttgtaatagtaaatggagaagataaaagtatggtggatgggcttacagctacaccacttgctagtgtaaaaaactcaccgattcttttatcatcaaatgaaaagcttcctcaaaaaactgtagaagaattgaaaaggctaaatccatcaaaagtagttgtgataggtggaaacaactcaatgccaaattcagttgttgaagctatcaaagctgtaaattcaaaaatatcagtacaaagaataggtggagatacaagatatcaaacttctattaatatagcaaaagaaatagataggacgaataatgtgagcaagttgtatataggagcaggaaatggagaagctgattcattatcaatagcatcactggctggtaaagaaaaaactccaatagtacttacacaaaaagatggtgtagataatgaagctgaacaatttattaaatcaaataaggtgtcaaatatatattttattggtggagtagaaaaaatatctaacaaggctattgaacaagttggaaaaatagcaaacaaagatatatcaaacaatagggtggcaggtcaaactagacaagagacgaatgccaaagtaatagataaattctactctcaatctaagctagatggagttgtagttgcaaatcaagacaaacttatagacgctttagcagttggaccattagcagctaaaaacaattcaccagttatacttgctacaaatacgttagataaatcacaagaatcgtcattaaaaggtaaaaattcatcaaagttgtttgaagtaggtggaggaatagcctcatctgtaatagacaagattaagagtttaattgaaaaa

SEQ ID NO: 195 - protein, 597 aa, Artificial Sequence
  Clostridium difficile
APVLQGTKTYEKVNTIDISVDSVENIVYSFQASIKVQGEVEVVDNEQKEKITWSDNIKSQIKSGNANATCRAEYNKSSNTTTLDIYVTSNEDLLDGNRLNIGRISVKKSGSNSNADYKVLGKGTSDKPALKIVTYNNKTVDYENISSDEGLIFTLINESEVKPIGGTGSSKNDPEKYKVEKSEALEYLLNNIRINYSIVSKETQESGSNVILKLGLAQKTTKGRKATINKYVEVTLPKSLEYIVENELSKPDELPPDNGSGGNNGGGSNSGGSSSGGSSGGGNSSDSTSNVTVKKLKGADRFETAIKISQSGWTKSDTVVIVNGEDKSMVDGLTATPLASVKNSPILLSSNEKLPQKTVEELKRLNPSKVVVIGGNNSMPNSVVEAIKAVNSKISVQRIGGDTRYQTSINIAKEIDRTNNVSKLYIGAGNGEADSLSIASLAGKEKTPIVLTQKDGVDNEAEQFIKSNKVSNIYFIGGVEKISNKAIEQVGKIANKDISNNRVAGQTRQETNAKVIDKFYSQSKLDGVVVANQDKLIDALAVGPLAAKNNSPVILATNTLDKSQESSLKGKNSSKLFEVGGGIASSVIDKIKSLIEK

SEQ ID NO: 196 - DNA, 25 bp, Artificial Sequence
  Primer
tttttcaattaaactcttaatcttg

SEQ ID NO: 197 - DNA, 22 bp, Artificial Sequence
  Primer
ggtagtaagattgtatttgcac

SEQ ID NO: 198 - DNA, 24 bp, Artificial Sequence
  Primer
ttcttcttttttcacttgtttagg

SEQ ID NO: 199 - DNA, 16 bp, Artificial Sequence
  Primer
gcacctgtgtttgcag

SEQ ID NO: 200 - DNA, 25 bp, Artificial Sequence
  Primer
agaactagcatcaatatctattgtc

SEQ ID NO: 201 - DNA, 22 bp, Artificial Sequence
  Primer
tcaagtataagtccagtaagag

SEQ ID NO: 202 - DNA, 19 bp, Artificial Sequence
  Primer
attaccttgtgcttgtgag

SEQ ID NO: 203 - DNA, 23 bp, Artificial Sequence
  Primer
agagttaatacaaatgtaagtgc

SEQ ID NO: 204 - DNA, 24 bp, Artificial Sequence
  Primer
tcctaataattgtaaaactccttg

SEQ ID NO: 205 - DNA, 20 bp, Artificial Sequence
  Primer
tgttcaatggaaggaccaag

SEQ ID NO: 206 - DNA, 25 bp, Artificial Sequence
  Primer
attcttaaagtcttttatattttcc

SEQ ID NO: 207 - DNA, 22 bp, Artificial Sequence
  Primer
ccagcattgtttagaaatatag

SEQ ID NO: 208 - DNA, 19 bp, Artificial Sequence
  Primer
atttaaaggaccccatccc

SEQ ID NO: 209 - DNA, 25 bp, Artificial Sequence
  Primer
ctagataagattgaaaatattcaag

SEQ ID NO: 210 - DNA, 20 bp, Artificial Sequence
  Primer
cttctttacagcatccaaac

SEQ ID NO: 211 - DNA, 20 bp, Artificial Sequence
  Primer
cttgaaaagggaacagtaac

SEQ ID NO: 212 - DNA, 21 bp, Artificial Sequence
  Primer
aacaaatcttcttgcaccaag

SEQ ID NO: 213 - DNA, 25 bp, Artificial Sequence
  Primer
tgttcaaaaaaagaagattctaaag

SEQ ID NO: 214 - DNA, 21 bp, Artificial Sequence
  Primer
ttgtgctagtaatccatttgc

SEQ ID NO: 215 - DNA, 22 bp, Artificial Sequence
  Primer
aatcccaaaagagagttgatag

SEQ ID NO: 216 - DNA, 23 bp, Artificial Sequence
  Primer
gctcttaaatagactataatcac

SEQ ID NO: 217 - DNA, 33 bp, Artificial Sequence
  Primer
attataataaattatgaattaattgtaaaatac

SEQ ID NO: 218 - DNA, 21 bp, Artificial Sequence
  Primer
atcctctgtttctaagtcttg

SEQ ID NO: 219 - DNA, 27 bp, Artificial Sequence
  Primer
ggatatagaagtattaataagtcattt

SEQ ID NO: 220 - DNA, 23 bp, Artificial Sequence
  Primer
tcttaaaacatcaaacattcctc

SEQ ID NO: 221 - DNA, 20 bp, Artificial Sequence
  Primer
gctccagttttacaaggaac

SEQ ID NO: 222 - DNA, 25 bp, Artificial Sequence
  Primer
tttttcaattaaactcttaatcttg

SEQ ID NO: 223 - DNA, 24 bp, Artificial Sequence
  Primer
tcagaattaggagagaatagtcag

SEQ ID NO: 224 - DNA, 24 bp, Artificial Sequence
  Primer
tttatcatcatttattgaaatctg

SEQ ID NO: 225 - DNA, 26 bp, Artificial Sequence
  Primer
tcaccaataagtaatgttgttataac

SEQ ID NO: 226 - DNA, 20 bp, Artificial Sequence
  Primer
tactggtggatttaccaaag

SEQ ID NO: 227 - DNA, 25 bp, Artificial Sequence
  Primer
tcaaatactttcgcagatactatag

SEQ ID NO: 228 - DNA, 27 bp, Artificial Sequence
  Primer
tgtcatatctaactttaacttcttttc

SEQ ID NO: 229 - DNA, 23 bp, Artificial Sequence
  Primer
gacaatactacaaagcaagaaag

SEQ ID NO: 230 - DNA, 29 bp, Artificial Sequence
  Primer
atcatctatttcaaattctaatattttac

SEQ ID NO: 231 - DNA, 25 bp, Artificial Sequence
  Primer
tttacaccaatagtatcttatgctg

SEQ ID NO: 232 - DNA, 23 bp, Artificial Sequence
  Primer
ttttactattgtatcatctcttg

SEQ ID NO: 233 - DNA, 23 bp, Artificial Sequence
  Primer
cattcaggaagaactgattcatc

SEQ ID NO: 234 - DNA, 24 bp, Artificial Sequence
  Primer
ataagtagcatttctacttttctc

SEQ ID NO: 235 - DNA, 25 bp, Artificial Sequence
  Primer
tatagtacatctagcaacaaaagtg

SEQ ID NO: 236 - DNA, 25 bp, Artificial Sequence
  Primer
tttgaagtatgttgttgttttactc

SEQ ID NO: 237 - DNA, 23 bp, Artificial Sequence
  Primer
tacaaagtaaatgctgatgagac

SEQ ID NO: 238 - DNA, 28 bp, Artificial Sequence
  Primer
tttagttgtcttatttatactcatattc

SEQ ID NO: 239 - DNA, 19 bp, Artificial Sequence
  Primer
ttaccgagtacacccgttc

SEQ ID NO: 240 - DNA, 24 bp, Artificial Sequence
  Primer
attgtagatagaatgggcttcatc

SEQ ID NO: 241 - DNA, 21 bp, Artificial Sequence
  Primer
gatgaagcccattctatctac

SEQ ID NO: 242 - DNA, 17 bp, Artificial Sequence
  Primer
gtcgctaggtctgctag

SEQ ID NO: 243 - DNA, 23 bp, Artificial Sequence
  Primer
caaactgtggcaacaaatttaac

SEQ ID NO: 244 - DNA, 23 bp, Artificial Sequence
  Primer
gttagaacttggactatttccac

SEQ ID NO: 245 - DNA, 25 bp, Artificial Sequence
  Primer
aaggtaggtcaaataaaatttagtg

SEQ ID NO: 246 - DNA, 29 bp, Artificial Sequence
  Primer
ttttaatatattaaataaacttgatagcc

SEQ ID NO: 247 - DNA, 27 bp, Artificial Sequence
  Primer
actgaatctaatgctatggaaaataac

SEQ ID NO: 248 - DNA, 26 bp, Artificial Sequence
  Primer
ttttaatgaatcttctatgcctttac

SEQ ID NO: 249 - DNA, 26 bp, Artificial Sequence
  Primer
tgtagtaatactaaaacaaaacaaag

SEQ ID NO: 250 - DNA, 24 bp, Artificial Sequence
  Primer
atttgattcattcgattttatatc

SEQ ID NO: 251 - DNA, 25 bp, Artificial Sequence
  Primer
cttgaaacaatttatactattcaag

SEQ ID NO: 252 - DNA, 24 bp, Artificial Sequence
  Primer
tttatattcaaaaaaatcttctcc

SEQ ID NO: 253 - DNA, 21 bp, Artificial Sequence
  Primer
tgttcaccaggaaaagataac

SEQ ID NO: 254 - DNA, 21 bp, Artificial Sequence
  Primer
tttctcaacaaagtatattgc

SEQ ID NO: 255 - DNA, 24 bp, Artificial Sequence
  Primer
tgttcatcaggaaataataaaaat

SEQ ID NO: 256 - DNA, 20 bp, Artificial Sequence
  Primer
ctcattaataggctccttag

SEQ ID NO: 257 - DNA, 25 bp, Artificial Sequence
  Primer
tgtagtagtaaaccaaaagaaaaag

SEQ ID NO: 258 - DNA, 21 bp, Artificial Sequence
  Primer
taatacctttgctttccagtc

SEQ ID NO: 259 - DNA, 2025 bp, Clostridium difficile
atgatgaaaaaaacaacaaaattattggcaacaggaatgttgtctgtagcaatggtggcaccaaacgtagctttagcggctgaaaatactactgcaaatacagaatctaattcagatattaatataaatttacaaagaaaaagtgtagtgttaggaagtaaatctaatgcaagtgtaaaatttaaagaaaaattaaatgctgattcaataacattaaattttatgtgttatgatatgccacttgaagctactttaaattacaatgaaaagacagattcatatgaaggtgtaataaactataacaaagacccagaatacttaaatgtatgggaacttcaaagcataaaaataaatggtaaagatgaacagaaagttttaaacaaagaagacttagagtctatgggattaaatcttaaggattatgatgttacacaagagtttataataagtgatgcaaattcaacaaaagcagtaaatgaatatatgagaaaaacttctgcaccagtaaaaaaacttgctggagctactagatttgaaactgctgttgagataagtaaacagggttggaaagatgggtctagtaaggttgtaatagttaatggagaattagcagcagatggaattacagctactccacttgcatctacatatgacgcaccaatattacttgcaaataaagatgatataccagaaagtacaaaagcagagttaaaacgtctaaatccaagtgatgtaataattataggtgatgatggttcagtttcacaaaaggcagtgtctcaaattaaatctgctgtaaatgtaaatgtgactcgtattggtggagttgatagacatgaaacatctttacttatagcaaaagaaatagataagtatcatgatgttaataaaatatacatagcaaatggatatgctggtgaatatgatgctcttaatatttcatcaaaagctggtgaagaccaacaacctataatattagctaataaagattctgtaccacaaggtacatataattggttatcttcacaaggtttagaagaagcttattacataggtggtagtcaaagtttatcatcaaaaattatagaccaaatatctaaaatagcaaaaaatggtacttcaaaaaatagagtttctggagcagatagacatgaaacaaatgcaaatgtaattaagactttctatccagataaagagttgagtgcaatgttagttgcaaaatctgacataatagttgattcaataacagcaggacctttagcagctaaattaaaagctccaatacttataactccaaaaacttatgtttctgcataccatagtacaaacttatcagaaaaaacagcagaaacagtatatcaaattggtgatggaatgaaagatagtgttataaattctatagcatctagtttatcaaaacacaatgcaccaacagaaccagataattcaggttcagcagcaggaaaaactgtagtgatagacccaggtcatgggggttctgattcaggggcaacaagtggattaaatggtggagcacaagaaaagaaatatactcttaatacagcattagcaactactgaatatttacgttcaaaaggtataaatgttgttatgactagagatacagataaaacaatggctttaggagaaagaacagcattatcaaatactataaagccagatttatttacaagtatacattacaatgcgtctaatggatctggtaatggtgtggaaatttattacaaagtaaaagataaaaatggtggaacaactaagactgcagcatcaaatatcttaaaaagaatactagaaaaatttaacatgaaaaatagaggaatcaagacaagaacacttgataatggaaaagattacctatatgtgttaagaaataacaattatccagcaatacttgttgaatgtgcatttattgacaataagagcgatatggataagttaaatactgcagaaaaagtaaaaacaatgggaactcaaattggaataggaatagaagatacagtaaaa

SEQ ID NO: 260 - protein, 675 aa, Clostridium difficile
MMKKTTKLLATGMLSVAMVAPNVALAAENTTANTESNSDININLQRKSVVLGSKSNASVKFKEKLNADSITLNFMCYDMPLEATLNYNEKTDSYEGVINYNKDPEYLNVWELQSIKINGKDEQKVLNKEDLESMGLNLKDYDVTQEFIISDANSTKAVNEYMRKTSAPVKKLAGATRFETAVEISKQGWKDGSSKVVIVNGELAADGITATPLASTYDAPILLANKDDIPESTKAELKRLNPSDVIIIGDDGSVSQKAVSQIKSAVNVNVTRIGGVDRHETSLLIAKEIDKYHDVNKIYIANGYAGEYDALNISSKAGEDQQPIILANKDSVPQGTYNWLSSQGLEEAYYIGGSQSLSSKIIDQISKIAKNGTSKNRVSGADRHETNANVIKTFYPDKELSAMLVAKSDIIVDSITAGPLAAKLKAPILITPKTYVSAYHSTNLSEKTAETVYQIGDGMKDSVINSIASSLSKHNAPTEPDNSGSAAGKTVVIDPGHGGSDSGATSGLNGGAQEKKYTLNTALATTEYLRSKGINVVMTRDTDKTMALGERTALSNTIKPDLFTSIHYNASNGSGNGVEIYYKVKDKNGGTTKTAASNILKRILEKFNMKNRGIKTRTLDNGKDYLYVLRNNNYPAILVECAFIDNKSDMDKLNTAEKVKTMGTQIGIGIEDTVK

SEQ ID NO: 261 - DNA, 1599 bp, Clostridium difficile
atgaaaatgaacaaaaaaatattatcattaggtctagcagtatcattaatcttagtaaacttcaaaagtgtaaatgcatcatcagtagtagaaaaaatatacggtaaagatagatatgaaacagcagcaaagatagctgataaacagacttatgaaacagtaattttagtaaatacagaaaaatcacttgcagatggattaagtgtaagtggattatcaggagctacaaaagctccaatactatttacacaacaaaataagataccagcagacacaaatagatgtctaaaaaatatcaaaaaagcatatataataggtacagaagatactataagtaaatcagtagaaaaagaactagattctaaaaatatagaagtaaaaagaattggtggagaagatagactaaaaacaagctatttaatagctaaagaaatagcaactataaaaaaagtggataaagtactattaactaatgcatatagtggagaagcagatgcaatgagtgtatcatcagtagctactagagatggagctccaatcatacttacagatggaaagagtgtgccttttgatgtaaaaaatattcaatcatattgtataggttcagaggagataatgagtaatcctctagttaaaaatacaaactcagtaagaatagaaggaactgaccgatttgaaactaacaaaaacgtaatagactacttttttaatagtgcagatggattctatgtatcagatggataccaattagtagatgcaatagcagctgcaccacttactaaaaactctccaatggtactagtaaatgatggaagcgataaaactgtattagaaggagctaagaatataacctctgtaggtgaaataaatgagaaggtaatacaacagtgtataaatgcttcaaagtcaaatggacaacccccaacaattacagttggaagtacagaggtatataagggtgaaaagtttgacactggcaagttaaatatagtagctaaagataacacagggaaggtattaccaatagaagttgatgggtttatagatacaaatagagtaggtacatatatattgacattaaaagctacagacgaatggggaaaaagtacaggaaaaagagtagaaataaaagtgttggatgacaaatctcatgattacaacagcccagaatttaaaaaaatggtatctactgaaatgtataacttaatcaattcctatagaaaagaaaaaggcaaagagcctttggtagtgtctagtaggctagaaggtatggcaaatgcatggtctaagtatatgatggataaaaaagtatttgcacattatatagatggaaaaaatgctccacaagtattttctgagtttggaatgagaagtgaggaaaatatagcatatatttatatagattctaagaacgttcaaactacacaagatgcaaaagacttggcaaaggctatatttgaggtgtggaagaaatctccagagtacaatgcaaacatgcttagtgatgagttttatagtactggatttgggctttatatattatctgatggtcaagtgcatgctactcaagagtttttaaatggcaatgaaggtagcttg

SEQ ID NO: 262 - protein, 533 aa, Clostridium difficile
MKMNKKILSLGLAVSLILVNFKSVNASSVVEKIYGKDRYETAAKIADKQTYETVILVNTEKSLADGLSVSGLSGATKAPILFTQQNKIPADTNRCLKNIKKAYIIGTEDTISKSVEKELDSKNIEVKRIGGEDRLKTSYLIAKEIATIKKVDKVLLTNAYSGEADAMSVSSVATRDGAPIILTDGKSVPFDVKNIQSYCIGSEEIMSNPLVKNTNSVRIEGTDRFETNKNVIDYFFNSADGFYVSDGYQLVDAIAAAPLTKNSPMVLVNDGSDKTVLEGAKNITSVGEINEKVIQQCINASKSNGQPPTITVGSTEVYKGEKFDTGKLNIVAKDNTGKVLPIEVDGFIDTNRVGTYILTLKATDEWGKSTGKRVEIKVLDDKSHDYNSPEFKKMVSTEMYNLINSYRKEKGKEPLVVSSRLEGMANAWSKYMMDKKVFAHYIDGKNAPQVFSEFGMRSEENIAYIYIDSKNVQTTQDAKDLAKAIFEVWKKSPEYNANMLSDEFYSTGFGLYILSDGQVHATQEFLNGNEGSL

SEQ ID NO: 263 - DNA, 1830 bp, Clostridium difficile
atgaaaatatcaaaaaagatagtgtctttgttaactatgacatttttaactgttacattatatggaaatacatctaatgcatctacaaaagatacattaacgggttctggaagatgggaaacagcaataaaaataagtcaagctgggtggacaaagtctgaaagtgctgtcttagtaaatgacaattccatagcagatgctttatcagctactccatttgctaaagcaaaagatgcgccaatattattaactcaaagtaataaattggatagtagaacaaaagcagaattaaaaagacttggtgtgaaaaatgtatatttaataggtggttcaattgcattaagttcagagattgaaaagcaattaaatgcagaaaatataaattttgaaagaatatccggaaatagtagatatgatacttctttaaaattagctgaaaagctagatagggaaaagtctatatctaaaatagtagtagtaaatggagaaaagggtcttgctgatgcagtgagtgttggagctatagctgctcaagaaaacatgccaataatactttctgattcagagaatggaactgaagtagctgataattttatagatagtaaagatatagcaaaatcgtatgtaataggtggtacatattctatttctaattctgtagaaagaagtttaccaaatgcaacaagaatagcaggtagtagtagaagtgagacaaatgcaaaaattatagaagaattttataaagatactgatataaaaaatatttatgtaacaaaagatggtacaaagaataagaatgatttaatagattctttagcagtgggtgtattagcagctaaaaatagttctccaatagtattagcaggaaataagcttgatactactcaaaaagatgttttaaatactaagattatagataaagttactcaaattggtggcttaggtaatgaaaatgttgtagaagatatactagatatacaagaagagactaagtatactgttgaaactattgatgaacttaatgctgctataaaaagagcagatgcaaatgatattataaagtttaaaccagagaaagaaaaaactataaataattcttttagtattgaaactaaaaaaactgttactattgaattagatggaagatatagacaaacaataactttggatatacctaatggaaaatttaataactatgcagaaatagaaggtggagtaaagctaaaaaacataaaaaatgaatcattagttaataaaggaagtatacaggatttagatatatatgatgaaaatggttgtaaaatagagaatgaaagttctggagaaatttggtttgttactatagttgaagaagctaatgatgtatatatagttaatagtggtgatataacaaaaatatcaaataattcttctagtactataataagaaattctggaaatattgatacagttacaggaaaaaaagaacctgcaataagtggaaataaacctaaagtcaatgatacagaaaaagaaactaaagctgctagaggcttaaatcctagggtagaagcatgttctgttcctaaaaaagattatgttatgataacaattcctaattcacctaaagattcaagatataaaatttactatagagtagtttataataaaccttatgcaatggatgttggtgataaaattaatattggagaatggactgttgcaccaacagatgaagagccatttcttgaaaaagctaaaaatggttgttatgtagaagctgttgaggtaaatacttcaacgaaagaggtttctagatggggaagaactaacgctacagatgatggattt

SEQ ID NO: 264 - protein, 610 aa, Clostridium difficile
MKISKKIVSLLTMTFLTVTLYGNTSNASTKDTLTGSGRWETAIKISQAGWTKSESAVLVNDNSIADALSATPFAKAKDAPILLTQSNKLDSRTKAELKRLGVKNVYLIGGSIALSSEIEKQLNAENINFERISGNSRYDTSLKLAEKLDREKSISKIVVVNGEKGLADAVSVGAIAAQENMPIILSDSENGTEVADNFIDSKDIAKSYVIGGTYSISNSVERSLPNATRIAGSSRSETNAKIIEEFYKDTDIKNIYVTKDGTKNKNDLIDSLAVGVLAAKNSSPIVLAGNKLDTTQKDVLNTKIIDKVTQIGGLGNENVVEDILDIQEETKYTVETIDELNAAIKRADANDIIKFKPEKEKTINNSFSIETKKTVTIELDGRYRQTITLDIPNGKFNNYAEIEGGVKLKNIKNESLVNKGSIQDLDIYDENGCKIENESSGEIWFVTIVEEANDVYIVNSGDITKISNNSSSTIIRNSGNIDTVTGKKEPAISGNKPKVNDTEKETKAARGLNPRVEACSVPKKDYVMITIPNSPKDSRYKIYYRVVYNKPYAMDVGDKINIGEWTVAPTDEEPFLEKAKNGCYVEAVEVNTSTKEVSRWGRTNATDDGF

SEQ ID NO: 265 - DNA, 2157 bp, Clostridium difficile
atgaataagaaaaatatagcaatagctatgtcaggtttaacagttttagcttcggctgctcctgtttttgctgcaactactggaacacaaggttatactgtagttaaaaacgactggaaaaaagcagtaaaacaattacaagatggactaaaagataatagtataggaaagataactgtatcttttaatgatggggttgtgggtgaagtagctcctaaaagtgctaataagaaagcggacagagatgctgcagctgagaagttatataatcttgttaacactcaattagataaattaggtgatggagattatgttgatttttctgtagattataatttagaaaacaaaataataactaatcaagcagatgcagaagcaattgttacaaagttaaattcacttaatgagaaaactcttattgatatagcaactaaagatacttttggaatggttagtaaaacacaagatagtgaaggtaaaaatgttgctgcaacaaaggcacttaaagttaaagatgttgctacatttggtttgaagtctggtggaagcgaagatactggatatgttgttgaaatgaaagcaggagctgtagaggataagtatggtaaagttggagatagtacggcaggtattgcaataaatcttcctagtactggacttgaatatgcaggtaaaggaacaacaattgattttaataaaactttaaaagttgatgtaacaggtggttcaacacctagtgctgtagctgtaagtggttttgtaactaaagatgatactgatttagcaaaatcaggtactataaatgtaagagttataaatgcaaaagaagaatcaattgatatagatgcaagctcatatacatcagctgaaaatttagctaaaagatatgtatttgatccagatgaaatttctgaagcatataaggcaatagtagcattacaaaatgatggtatagagtctaatttagttcagttagttaatggaaaatatcaagtgattttttatccagaaggtaaaagattagaaactaaatcagcaaatgatacaatagctagtcaagatacaccagctaaagtagttataaaagctaataaattaaaagatttaaaagattatgtagatgatttaaaaacatataataatacttattcaaatgttgtaacagtagcaggagaagatagaatagaaactgctatagaattaagtagtaaatattataattctgatgataaaaatgcaataactgataaagcagttaatgatatagtattagttggatctacatctatagttgatggtcttgttgcatcaccattagcttcagaaaaaacagctccattattattaacttcaaaagataaattagattcatcagtaaaatctgaaataaagagagttatgaacttaaagagtgacactggtataaatacttctaaaaaagtttatttagctggtggagttaattctatatctaaagatgtagaaaatgaattgaaaaacatgggtcttaaagttactagattatcaggagaagacagatacgaaacttctttagcaatagctgatgaaataggtcttgataatgataaagcatttgtagttggtggtactggattagcagatgctatgagtatagctccagttgcttctcaacttaaagatggagatgctactccaatagtagttgtagatggaaaagcaaaagaaataagtgatgatgctaagagtttcttaggaacttctgatgttgatataataggtggaaaaaatagcgtatctaaagagattgaagagtcaatagatagtgcaactggaaaaactccagatagaataagtggagatgatagacaagcaactaatgctgaagttttaaaagaagatgattatttcacagatggtgaagttgtgaattactttgttgcaaaagatggttctactaaagaagatcaattagtagatgccttagcagcagcaccaatagcaggtagatttaaggagtctccagctccaatcatactagctactgatactttatcttctgaccaaaatgtagctgtaagtaaagcagttcctaaagatggtggaactaacttagttcaagtaggtaaaggtatagcttcttcagttataaacaaaatgaaagatttattagatatg

SEQ ID NO: 266 - protein, 719 aa, Clostridium difficile
MNKKNIAIAMSGLTVLASAAPVFAATTGTQGYTVVKNDWKKAVKQLQDGLKDNSIGKITVSFNDGVVGEVAPKSANKKADRDAAAEKLYNLVNTQLDKLGDGDYVDFSVDYNLENKIITNQADAEAIVTKLNSLNEKTLIDIATKDTFGMVSKTQDSEGKNVAATKALKVKDVATFGLKSGGSEDTGYVVEMKAGAVEDKYGKVGDSTAGIAINLPSTGLEYAGKGTTIDFNKTLKVDVTGGSTPSAVAVSGFVTKDDTDLAKSGTINVRVINAKEESIDIDASSYTSAENLAKRYVFDPDEISEAYKAIVALQNDGIESNLVQLVNGKYQVIFYPEGKRLETKSANDTIASQDTPAKVVIKANKLKDLKDYVDDLKTYNNTYSNVVTVAGEDRIETAIELSSKYYNSDDKNAITDKAVNDIVLVGSTSIVDGLVASPLASEKTAPLLLTSKDKLDSSVKSEIKRVMNLKSDTGINTSKKVYLAGGVNSISKDVENELKNMGLKVTRLSGEDRYETSLAIADEIGLDNDKAFVVGGTGLADAMSIAPVASQLKDGDATPIVVVDGKAKEISDDAKSFLGTSDVDIIGGKNSVSKEIEESIDSATGKTPDRISGDDRQATNAEVLKEDDYFTDGEVVNYFVAKDGSTKEDQLVDALAAAPIAGRFKESPAPIILATDTLSSDQNVAVSKAVPKDGGTNLVQVGKGIASSVINKMKDLLDM

SEQ ID NO: 267 - DNA, 1947 bp, Clostridium difficile
gctgaaaatactactgcaaatacagaatctaattcagatattaatataaatttacaaagaaaaagtgtagtgttaggaagtaaatctaatgcaagtgtaaaatttaaagaaaaattaaatgctgattcaataacattaaattttatgtgttatgatatgccacttgaagctactttaaattacaatgaaaagacagattcatatgaaggtgtaataaactataacaaagacccagaatacttaaatgtatgggaacttcaaagcataaaaataaatggtaaagatgaacagaaagttttaaacaaagaagacttagagtctatgggattaaatcttaaggattatgatgttacacaagagtttataataagtgatgcaaattcaacaaaagcagtaaatgaatatatgagaaaaacttctgcaccagtaaaaaaacttgctggagctactagatttgaaactgctgttgagataagtaaacagggttggaaagatgggtctagtaaggttgtaatagttaatggagaattagcagcagatggaattacagctactccacttgcatctacatatgacgcaccaatattacttgcaaataaagatgatataccagaaagtacaaaagcagagttaaaacgtctaaatccaagtgatgtaataattataggtgatgatggttcagtttcacaaaaggcagtgtctcaaattaaatctgctgtaaatgtaaatgtgactcgtattggtggagttgatagacatgaaacatctttacttatagcaaaagaaatagataagtatcatgatgttaataaaatatacatagcaaatggatatgctggtgaatatgatgctcttaatatttcatcaaaagctggtgaagaccaacaacctataatattagctaataaagattctgtaccacaaggtacatataattggttatcttcacaaggtttagaagaagcttattacataggtggtagtcaaagtttatcatcaaaaattatagaccaaatatctaaaatagcaaaaaatggtacttcaaaaaatagagtttctggagcagatagacatgaaacaaatgcaaatgtaattaagactttctatccagataaagagttgagtgcaatgttagttgcaaaatctgacataatagttgattcaataacagcaggacctttagcagctaaattaaaagctccaatacttataactccaaaaacttatgtttctgcataccatagtacaaacttatcagaaaaaacagcagaaacagtatatcaaattggtgatggaatgaaagatagtgttataaattctatagcatctagtttatcaaaacacaatgcaccaacagaaccagataattcaggttcagcagcaggaaaaactgtagtgatagacccaggtcatgggggttctgattcaggggcaacaagtggattaaatggtggagcacaagaaaagaaatatactcttaatacagcattagcaactactgaatatttacgttcaaaaggtataaatgttgttatgactagagatacagataaaacaatggctttaggagaaagaacagcattatcaaatactataaagccagatttatttacaagtatacattacaatgcgtctaatggatctggtaatggtgtggaaatttattacaaagtaaaagataaaaatggtggaacaactaagactgcagcatcaaatatcttaaaaagaatactagaaaaatttaacatgaaaaatagaggaatcaagacaagaacacttgataatggaaaagattacctatatgtgttaagaaataacaattatccagcaatacttgttgaatgtgcatttattgacaataagagcgatatggataagttaaatactgcagaaaaagtaaaaacaatgggaactcaaattggaataggaatagaagatacagtaaaa

SEQ ID NO: 268 - protein, 649 aa, Clostridium difficile
AENTTANTESNSDININLQRKSVVLGSKSNASVKFKEKLNADSITLNFMCYDMPLEATLNYNEKTDSYEGVINYNKDPEYLNVWELQSIKINGKDEQKVLNKEDLESMGLNLKDYDVTQEFIISDANSTKAVNEYMRKTSAPVKKLAGATRFETAVEISKQGWKDGSSKVVIVNGELAADGITATPLASTYDAPILLANKDDIPESTKAELKRLNPSDVIIIGDDGSVSQKAVSQIKSAVNVNVTRIGGVDRHETSLLIAKEIDKYHDVNKIYIANGYAGEYDALNISSKAGEDQQPIILANKDSVPQGTYNWLSSQGLEEAYYIGGSQSLSSKIIDQISKIAKNGTSKNRVSGADRHETNANVIKTFYPDKELSAMLVAKSDIIVDSITAGPLAAKLKAPILITPKTYVSAYHSTNLSEKTAETVYQIGDGMKDSVINSIASSLSKHNAPTEPDNSGSAAGKTVVIDPGHGGSDSGATSGLNGGAQEKKYTLNTALATTEYLRSKGINVVMTRDTDKTMALGERTALSNTIKPDLFTSIHYNASNGSGNGVEIYYKVKDKNGGTTKTAASNILKRILEKFNMKNRGIKTRTLDNGKDYLYVLRNNNYPAILVECAFIDNKSDMDKLNTAEKVKTMGTQIGIGIEDTVK

SEQ ID NO: 269 - DNA, 1599 bp, Clostridium difficile; identical to SEQ ID NO: 261

SEQ ID NO: 270 - protein, 533 aa, Clostridium difficile; identical to SEQ ID NO: 262

SEQ ID NO: 271 - DNA, 1770 bp, Clostridium difficile
tatggaaatacatctaatgcatctacaaaagatacattaacgggttctggaagatgggaaacagcaataaaaataagtcaagctgggtggacaaagtctgaaagtgctgtcttagtaaatgacaattccatagcagatgctttatcagctactccatttgctaaagcaaaagatgcgccaatattattaactcaaagtaataaattggatagtagaacaaaagcagaattaaaaagacttggtgtgaaaaatgtatatttaataggtggttcaattgcattaagttcagagattgaaaagcaattaaatgcagaaaatataaattttgaaagaatatccggaaatagtagatatgatacttctttaaaattagctgaaaagctagatagggaaaagtctatatctaaaatagtagtagtaaatggagaaaagggtcttgctgatgcagtgagtgttggagctatagctgctcaagaaaacatgccaataatactttctgattcagagaatggaactgaagtagctgataattttatagatagtaaagatatagcaaaatcgtatgtaataggtggtacatattctatttctaattctgtagaaagaagtttaccaaatgcaacaagaatagcaggtagtagtagaagtgagacaaatgcaaaaattatagaagaattttataaagatactgatataaaaaatatttatgtaacaaaagatggtacaaagaataagaatgatttaatagattctttagcagtgggtgtattagcagctaaaaatagttctccaatagtattagcaggaaataagcttgatactactcaaaaagatgttttaaatactaagattatagataaagttactcaaattggtggcttaggtaatgaaaatgttgtagaagatatactagatatacaagaagagactaagtatactgttgaaactattgatgaacttaatgctgctataaaaagagcagatgcaaatgatattataaagtttaaaccagagaaagaaaaaactataaataattcttttagtattgaaactaaaaaaactgttactattgaattagatggaagatatagacaaacaataactttggatatacctaatggaaaatttaataactatgcagaaatagaaggtggagtaaagctaaaaaacataaaaaatgaatcattagttaataaaggaagtatacaggatttagatatatatgatgaaaatggttgtaaaatagagaatgaaagttctggagaaatttggtttgttactatagttgaagaagctaatgatgtatatatagttaatagtggtgatataacaaaaatatcaaataattcttctagtactataataagaaattctggaaatattgatacagttacaggaaaaaaagaacctgcaataagtggaaataaacctaaagtcaatgatacagaaaaagaaactaaagctgctagaggcttaaatcctagggtagaagcatgttctgttcctaaaaaagattatgttatgataacaattcctaattcacctaaagattcaagatataaaatttactatagagtagtttataataaaccttatgcaatggatgttggtgataaaattaatattggagaatggactgttgcaccaacagatgaagagccatttcttgaaaaagctaaaaatggttgttatgtagaagctgttgaggtaaatacttcaacgaaagaggtttctagatggggaagaactaacgctacagatgatggattt

SEQ ID NO: 272 - protein, 590 aa, Clostridium difficile
YGNTSNASTKDTLTGSGRWETAIKISQAGWTKSESAVLVNDNSIADALSATPFAKAKDAPILLTQSNKLDSRTKAELKRLGVKNVYLIGGSIALSSEIEKQLNAENINFERISGNSRYDTSLKLAEKLDREKSISKIVVVNGEKGLADAVSVGAIAAQENMPIILSDSENGTEVADNFIDSKDIAKSYVIGGTYSISNSVERSLPNATRIAGSSRSETNAKIIEEFYKDTDIKNIYVTKDGTKNKNDLIDSLAVGVLAAKNSSPIVLAGNKLDTTQKDVLNTKIIDKVTQIGGLGNENVVEDILDIQEETKYTVETIDELNAAIKRADANDIIKFKPEKEKTINNSFSIETKKTVTIELDGRYRQTITLDIPNGKFNNYAEIEGGVKLKNIKNESLVNKGSIQDLDIYDENGCKIENESSGEIWFVTIVEEANDVYIVNSGDITKISNNSSSTIIRNSGNIDTVTGKKEPAISGNKPKVNDTEKETKAARGLNPRVEACSVPKKDYVMITIPNSPKDSRYKIYYRVVYNKPYAMDVGDKINIGEWTVAPTDEEPFLEKAKNGCYVEAVEVNTSTKEVSRWGRTNATDDGF

SEQ ID NO: 273 - DNA, 2085 bp, Clostridium difficile
gcaactactggaacacaaggttatactgtagttaaaaacgactggaaaaaagcagtaaaacaattacaagatggactaaaagataatagtataggaaagataactgtatcttttaatgatggggttgtgggtgaagtagctcctaaaagtgctaataagaaagcggacagagatgctgcagctgagaagttatataatcttgttaacactcaattagataaattaggtgatggagattatgttgatttttctgtagattataatttagaaaacaaaataataactaatcaagcagatgcagaagcaattgttacaaagttaaattcacttaatgagaaaactcttattgatatagcaactaaagatacttttggaatggttagtaaaacacaagatagtgaaggtaaaaatgttgctgcaacaaaggcacttaaagttaaagatgttgctacatttggtttgaagtctggtggaagcgaagatactggatatgttgttgaaatgaaagcaggagctgtagaggataagtatggtaaagttggagatagtacggcaggtattgcaataaatcttcctagtactggacttgaatatgcaggtaaaggaacaacaattgattttaataaaactttaaaagttgatgtaacaggtggttcaacacctagtgctgtagctgtaagtggttttgtaactaaagatgatactgatttagcaaaatcaggtactataaatgtaagagttataaatgcaaaagaagaatcaattgatatagatgcaagctcatatacatcagctgaaaatttagctaaaagatatgtatttgatccagatgaaatttctgaagcatataaggcaatagtagcattacaaaatgatggtatagagtctaatttagttcagttagttaatggaaaatatcaagtgattttttatccagaaggtaaaagattagaaactaaatcagcaaatgatacaatagctagtcaagatacaccagctaaagtagttataaaagctaataaattaaaagatttaaaagattatgtagatgatttaaaaacatataataatacttattcaaatgttgtaacagtagcaggagaagatagaatagaaactgctatagaattaagtagtaaatattataattctgatgataaaaatgcaataactgataaagcagttaatgatatagtattagttggatctacatctatagttgatggtcttgttgcatcaccattagcttcagaaaaaacagctccattattattaacttcaaaagataaattagattcatcagtaaaatctgaaataaagagagttatgaacttaaagagtgacactggtataaatacttctaaaaaagtttatttagctggtggagttaattctatatctaaagatgtagaaaatgaattgaaaaacatgggtcttaaagttactagattatcaggagaagacagatacgaaacttctttagcaatagctgatgaaataggtcttgataatgataaagcatttgtagttggtggtactggattagcagatgctatgagtatagctccagttgcttctcaacttaaagatggagatgctactccaatagtagttgtagatggaaaagcaaaagaaataagtgatgatgctaagagtttcttaggaacttctgatgttgatataataggtggaaaaaatagcgtatctaaagagattgaagagtcaatagatagtgcaactggaaaaactccagatagaataagtggagatgatagacaagcaactaatgctgaagttttaaaagaagatgattatttcacagatggtgaagttgtgaattactttgttgcaaaagatggttctactaaagaagatcaattagtagatgccttagcagcagcaccaatagcaggtagatttaaggagtctccagctccaatcatactagctactgatactttatcttctgaccaaaatgtagctgtaagtaaagcagttcctaaagatggtggaactaacttagttcaagtaggtaaaggtatagcttcttcagttataaacaaaatgaaagatttattagatatg

SEQ ID NO: 274 - protein, 695 aa, Clostridium difficile
ATTGTQGYTVVKNDWKKAVKQLQDGLKDNSIGKITVSFNDGVVGEVAPKSANKKADRDAAAEKLYNLVNTQLDKLGDGDYVDFSVDYNLENKIITNQADAEAIVTKLNSLNEKTLIDIATKDTFGMVSKTQDSEGKNVAATKALKVKDVATFGLKSGGSEDTGYVVEMKAGAVEDKYGKVGDSTAGIAINLPSTGLEYAGKGTTIDFNKTLKVDVTGGSTPSAVAVSGFVTKDDTDLAKSGTINVRVINAKEESIDIDASSYTSAENLAKRYVFDPDEISEAYKAIVALQNDGIESNLVQLVNGKYQVIFYPEGKRLETKSANDTIASQDTPAKVVIKANKLKDLKDYVDDLKTYNNTYSNVVTVAGEDRIETAIELSSKYYNSDDKNAITDKAVNDIVLVGSTSIVDGLVASPLASEKTAPLLLTSKDKLDSSVKSEIKRVMNLKSDTGINTSKKVYLAGGVNSISKDVENELKNMGLKVTRLSGEDRYETSLAIADEIGLDNDKAFVVGGTGLADAMSIAPVASQLKDGDATPIVVVDGKAKEISDDAKSFLGTSDVDIIGGKNSVSKEIEESIDSATGKTPDRISGDDRQATNAEVLKEDDYFTDGEVVNYFVAKDGSTKEDQLVDALAAAPIAGRFKESPAPIILATDTLSSDQNVAVSKAVPKDGGTNLVQVGKGIASSVINKMKDLLDM

SEQ ID NO: 275 - DNA, 23 bp, Artificial Sequence
  Primer
gctgaaaatactactgcaaatac

SEQ ID NO: 276 - DNA, 26 bp, Artificial Sequence
  Primer
ttttactgtatcttctattcctattc

SEQ ID NO: 277 - DNA, 23 bp, Artificial Sequence
  Primer
aacttcaaaagtgtaaatgcatc

SEQ ID NO: 278 - DNA, 18 bp, Artificial Sequence
  Primer
caagctaccttcattgcc

SEQ ID NO: 279 - DNA, 23 bp, Artificial Sequence
  Primer
tatggaaatacatctaatgcatc

SEQ ID NO: 280 - DNA, 23 bp, Artificial Sequence
  Primer
aaatccatcatctgtagcgttag

SEQ ID NO: 281 - DNA, 20 bp, Artificial Sequence
  Primer
gcaactactggaacacaagg

SEQ ID NO: 282 - DNA, 28 bp, Artificial Sequence
  Primer
catatctaataaatctttcattttgttt

SEQ ID NO: 283 - DNA, 1020 bp, Clostridium difficile
gtgaagaaaaagatattaataccagtatttgcatcagttatggcattatcagtaagttcaattgtaaatgcagatgaagtaaatgattcatctcaaaataaggatgataaaacaaatactgaattaaatttaggtgaatataaagaagtaaaatataaagttgcaaaaataaaagatggagtagctataaagataagagaagaaggtcaagttcaaaacatagcttattctggagatgaatttacggttttaggaactcaaggagaatgggttaaggttaaagttgaagatggcgaaggttggttagctactagatatgtagatatatctgaaggtgtaggatatactaacgctgataaagtaaacttaagaaaagataagagtgaaagttcagaagtaattgaagagctggaaaaaggaagttctttattggttttggaagataatggagattggttaaaagttaaagatggggaaacagaaggatatgtaaaatcatcttatatatctgataaagctcctgtaatagaagagccacaagtaaacccaagtattgaccaaaatgtagattctacaaataataatcaacaaaacaatgcaaatactaatcaacaaaataataattcaaatgtgccaacagctaactctaatgcagttcaagctgtacttaacttggcatattctaagcaaggttgtccatatgtttggggagcagaaggaccaaacacttttgactgttctggatttacacaatatgtgtatagaaatgcagtaggaaagaatataccaagaacatctaaagcacaatctaaatatggacaaactgtaagtaaagcaaatttacaaccaggagacttagtattcttcacaactaatggttctggttctgttagtcatgttggaatatatgtaggtgggggtaatatgatacattcaccatcaacaggaaaaacagttagtgtaactagtataaattcatcatactatacagcaagatttgttacagcaaaaagaatatta

SEQ ID NO: 284 - protein, 340 aa, Clostridium difficile
MKKKILIPVFASVMALSVSSIVNADEVNDSSQNKDDKTNTELNLGEYKEVKYKVAKIKDGVAIKIREEGQVQNIAYSGDEFTVLGTQGEWVKVKVEDGEGWLATRYVDISEGVGYTNADKVNLRKDKSESSEVIEELEKGSSLLVLEDNGDWLKVKDGETEGYVKSSYISDKAPVIEEPQVNPSIDQNVDSTNNNQQNNANTNQQNNNSNVPTANSNAVQAVLNLAYSKQGCPYVWGAEGPNTFDCSGFTQYVYRNAVGKNIPRTSKAQSKYGQTVSKANLQPGDLVFFTTNGSGSVSHVGIYVGGGNMIHSPSTGKTVSVTSINSSYYTARFVTAKRIL

SEQ ID NO: 285 - DNA, 1680 bp, Clostridium difficile
ttgaagaggaacttcaatatgatgtttaaaatatttaataaaagtctattaaaattagtagttgtattatcaatagtactgacaatatcaaattttagcttatcttcatatgcatcagaaattacttccagcacagataaggtattaatcatatatgattctaagaaagaaacagcttataatagagatattttaaatattatgaggactctattgggaagatttagttcagatatagagctattaaaattgagtaactatgatggtgagataaataaaaattattacagtcatatatttattttaggaatcaatgaaaactcatataataatgataaaaacactaaaaacttgattagttccttaaattcatataaaggaactatatgttggttaggatatggtatagaaaatcttttggaacataaaaaatacaatttagactatgtaggaaaaacaaacaatatagttagtgtaaattatagaggtaaatcatataacttggatgaacattatgtttttaacattgtagaatcaaaagatacaagtaataaagtaataggaagtattaatgataccttaaataagtatccatatataataaatgataaaaatcttttttatgtatcaaaattagatttagatggagttttattttatatattttgcgattcacttaatgatatttttaatattaagacgtttgataaaggacgtatatttgtaagaatagaagatgtacatgcttttagagaaccaaaaaatcttgtagagatagcggattatttaagtagtaagaatataccatttacgattgcattaataccagcatatgtaaatcctaaaaatcataaggtaataactttatcagaaagccctgaaattgtcaaagcaataaaatatatgcaagataaaggtggaactgtgatattgcatggatatactcatcaatacaagaaagaagaagtttctggagaagggtatgaattttgggatggtaaaaaagatgaacccttaaaagaaaatatgaagatatttgtcaaagatagagttttgaatggtcttagagtatgtatagagaatggaatttatcctcttgcatttgaagcgccacattatgcaatggaatcagagggatataaagaattaaaaaaatatttttctacttatatggggcaacatcaaaataatgataaaaaatttagcacaaatacatatccttatattattagggatacagaagagtttaatatatttatacccgaaaatttaggatatatagacccagaagataagtttacttttcaaaatataaaagaaaatttagataaattatccattgtaagaggttttagtggagggttcttctttcattcatatttaaacatagagtatctaaaaaacacaatagaatatttagaaaaacagaatatagaatttatgaatttaagagattttaataattgggtaaaagttgatgaaatacaaataagaaatagtggagatgaaattatagtcaactatgataaggacttagatgaaataactaaaagtgatactagatttaaatccatatccaatattagtaaagttttaatattcatagtatctataagtgttttaatatttgtgattatatttatatattttaagagaatagataaaaagaaatttttaaaa

SEQ ID NO: 286 - protein, 560 aa, Clostridium difficile
MKRNFNMMFKIFNKSLLKLVVVLSIVLTISNFSLSSYASEITSSTDKVLIIYDSKKETAYNRDILNIMRTLLGRFSSDIELLKLSNYDGEINKNYYSHIFILGINENSYNNDKNTKNLISSLNSYKGTICWLGYGIENLLEHKKYNLDYVGKTNNIVSVNYRGKSYNLDEHYVFNIVESKDTSNKVIGSINDTLNKYPYIINDKNLFYVSKLDLDGVLFYIFCDSLNDIFNIKTFDKGRIFVRIEDVHAFREPKNLVEIADYLSSKNIPFTIALIPAYVNPKNHKVITLSESPEIVKAIKYMQDKGGTVILHGYTHQYKKEEVSGEGYEFWDGKKDEPLKENMKIFVKDRVLNGLRVCIENGIYPLAFEAPHYAMESEGYKELKKYFSTYMGQHQNNDKKFSTNTYPYIIRDTEEFNIFIPENLGYIDPEDKFTFQNIKENLDKLSIVRGFSGGFFFHSYLNIEYLKNTIEYLEKQNIEFMNLRDFNNWVKVDEIQIRNSGDEIIVNYDKDLDEITKSDTRFKSISNISKVLIFIVSISVLIFVIIFIYFKRIDKKKFLK

SEQ ID NO: 287 - DNA, 1050 bp, Clostridium difficile
ttgaaaattaaatctaaaaaaataatagcatttgcactttcacttgggattatgttgccaagttgtgtatatgcagacactattagtaaaaatcaaaatgcacaggtagatatgaacaattatcttcaaggtagaaaatctccaaaggaggaaaaacttattggtgaagatagatttgatacagcgataaaaatatctcaaagtggttggaataatggttcagaaagggtgtttctagttaactcaaattcattgccagatgcattggcttcaactcctttggcaagtaaattggatgcaccaatactgcttacaaataaaaatagtataccatataatgtaacagaggaaataaaaaggcttaatccagcagaagttattttaattggaagtgaaggagctatttcatcaagtgtaaaagaatctcttgaagatatggaagtattagtcagtagaatcggtggagcagatagagaagaaacatctttacttcttactagacagctagatgatactggtgatttaggtgtctcaaaagtggcagtggttaatgggtataatggactggcagatgcaacttcaatatcaagcccagctgcaagtgataatacagctataatatatacaggtaaggatagcataagaagtgaggcaaagaattttattacacaaaactcaactaagacatacatagtaggtggggagtacagtataagtaaaaaacttgaaggacagttagtaaactcagaaagactagcagggacagatagaaaagatactaatgcgaaagttttagaaaagttttatggaaaatcaagtaaggttaataatatgtattttgcaaaagatggaagtggtagagaagctgatttagttgatgggcttgctgctggagtattagcatcaaaaacaaagtcacctgtagtacttgcaagtggaagtttaagtagtgcacagaaaagttttataaaaaaagtaaaggctgataaatttgtacaagttggtggaggtaaaaatagtaaaccatatgcagaagcattagccttacag

SEQ ID NO: 288 - protein, 350 aa, Clostridium difficile
MKIKSKKIIAFALSLGIMLPSCVYADTISKNQNAQVDMNNYLQGRKSPKEEKLIGEDRFDTAIKISQSGWNNGSERVFLVNSNSLPDALASTPLASKLDAPILLTNKNSIPYNVTEEIKRLNPAEVILIGSEGAISSSVKESLEDMEVLVSRIGGADREETSLLLTRQLDDTGDLGVSKVAVVNGYNGLADATSISSPAASDNTAIIYTGKDSIRSEAKNFITQNSTKTYIVGGEYSISKKLEGQLVNSERLAGTDRKDTNAKVLEKFYGKSSKVNNMYFAKDGSGREADLVDGLAAGVLASKTKSPVVLASGSLSSAQKSFIKKVKADKFVQVGGGKNSKPYAEALALQ

SEQ ID NO: 289 - DNA, 3024 bp, Clostridium difficile
atgtttaagcaaaggctctctaaattattatctagtacattagtattgagtatgttatttactgctgctccaaatattacttttgctgataatacaaaagataattccgaaaaatatcaaagttctgatatagaattacatgattatagtaaaaacgcggaatcttacacaaaaactaaagctcttgctaaagagaaaattcaaactttgctatcaaagtatggtgctgtaagtgctcaatatgctttgattgataatggcaaaattgagatttctggtaatggtggagtttacagcaaacaggataacaaaaacttaaataaggataatatgtatagtatcgcatctatcagtaaaatgtttactacaacagctgttatgaagttggttgatgatggaaaattaaatttagatactcctgttgtaaagtatatacctgaatttaaaatggctgatgatagatacaaggaaatcactccaagaatgttattaaatcattcatcagggttgatgggaagtagttttaaaaacactattttattagcagacaatgattcttatggtcatgataatttcttaaaagaattacaaaaacaaagattaaaagctaaaccaggagctttttctgtttattgtaatgatggatttactttagctgaaattttagtagaaagagtatctggtatgtcatttactaattttcttgataaatacataaataatccacttaacttacaaaatacaaaaactccagaaaatagttttgatagttcaaaactagcaaaagcatacgtaccttattgggaagatgcagttccgcaagataaccttaatgctataggtgcaggtggtttatattcaagtgcagaaaatctatgtacatttgcacaaacatttatgaaaaattcaaatggtattctttctcctgcttcagtaaaagctatggaaaacaaagaatatttaaatggtctatggcctgaaggagaagattctatacttggatatggtttaggttgggattgtgtcaacacttatccatttaatcagtataatttaaaagctcttacaaaaggtggagactctttattattccacagtaatcttatagttcttccagatgaaaatatggcagttgcagttctttcttctggtggaagtagtcaacttaacgaaataattggacaagaaatcttactatctgcattaaaagaaaaaggtaaaattaaagaaataaaacctgataaaacatttagtaaaccacaacaagttaaaatgcctagctctctaaaagaaaatagtggtctttatgcttcttcaaatatgataaaagtagatgttaatgataatggtactttaacagtatcttctccttatatagaaaatggacctgaagataaatacgtatacataggtcaagatagatttgtatctgaaaaaggtaacagctgtctaaaatttgtaaaagaaaaaaacaatatcacatatttaaatatgagctcttatgatgatgtccctggattaggtcagacagcaagtttatactatgtagctcaaaagatagatgacaacaatatatcaaatagtgtaaaagaagcatggaaaaaaagaaatggtaaagattactatctagtagatgaaaaatatacttctcaaagctatatgtttggttctgtgaaggcaactcttgctctttctgatgaaactccaggttatatagttaacactaaaataatggatgagaataactcaaatgcttttatagaaatacctggtgtaataggtcgtgatttatccgacattaaacttcataaagaaaatggtacagagtatttatcttttggaacactaacgtatgttagtgaagattctataactaatttgccagcagaaaaatcttttacttgtgaactagaatccaatggttatgcaaaatggtataagattggtgacgatatcgcaaataaaaaaatagaagttaatcttcctcaaaattcatcttttgctgtttatgatgataaaggtgttcctgtaaactattctttagttacaaagaacaatagagttagattgccaaaaggaggcgtaattgttttcttaggaagtccaaatgctagatttgaggttacatatcaagatgaagtaaatgcaagtgcacttacaggaactgatagatatgaaacttctattaagataagtcaagcaggttgggaaaatgctgaaaatgcagttttaataaacgattcagcaattgcagatgctttggctgcaacaccatttgcatacaagaaaaacgctcctatattattgactggaagctctcaaataaatgaaaaaactttggctgaattaaagagattaaaagttaaaaatgtatatgtagttggtggagaggcttctataaatgaaaaatctttagatactataaaatcaaacaatatctctgtatctagaatttcaggaagtgatagatatcaaacttctatgaacattgctaaagaattgaacaatattagcaatatatcaaagatttcagtagttaatggcgaaaaaggattagccgatgcagtaagcattggagctgtatcagctcaaaatgatatgcctataatacttactaatgaaaatagtaatataactgaaataaataacttgtttaaaaacaaaaagattgataaatcttatgtaatcggtggagaatatacagtttctaaaaatatagaaagtaaacttcaaaatccacagagaatatcaggtagcactagaaatgaaactaatgcaaaagtaataaaagaattttacaaggattctaagatagacaatttatatgttgctaaaaatggaatgaataaacaagatgatttaatagacggattatctgttggagttttggctggaaaaactaaatctcctgtaatgctagtaggaaactcactagattataatcaaaaagaactatttaaaactatgagatttaaatctgtaacacaaattggtggaaatggaaatgaaaactcatttaagtaa

SEQ ID NO: 290 - protein, 1007 aa, Clostridium difficile
MFKQRLSKLLSSTLVLSMLFTAAPNITFADNTKDNSEKYQSSDIELHDYSKNAESYTKTKALAKEKIQTLLSKYGAVSAQYALIDNGKIEISGNGGVYSKQDNKNLNKDNMYSIASISKMFTTTAVMKLVDDGKLNLDTPVVKYIPEFKMADDRYKEITPRMLLNHSSGLMGSSFKNTILLADNDSYGHDNFLKELQKQRLKAKPGAFSVYCNDGFTLAEILVERVSGMSFTNFLDKYINNPLNLQNTKTPENSFDSSKLAKAYVPYWEDAVPQDNLNAIGAGGLYSSAENLCTFAQTFMKNSNGILSPASVKAMENKEYLNGLWPEGEDSILGYGLGWDCVNTYPFNQYNLKALTKGGDSLLFHSNLIVLPDENMAVAVLSSGGSSQLNEIIGQEILLSALKEKGKIKEIKPDKTFSKPQQVKMPSSLKENSGLYASSNMIKVDVNDNGTLTVSSPYIENGPEDKYVYIGQDRFVSEKGNSCLKFVKEKNNITYLNMSSYDDVPGLGQTASLYYVAQKIDDNNISNSVKEAWKKRNGKDYYLVDEKYTSQSYMFGSVKATLALSDETPGYIVNTKIMDENNSNAFIEIPGVIGRDLSDIKLHKENGTEYLSFGTLTYVSEDSITNLPAEKSFTCELESNGYAKWYKIGDDIANKKIEVNLPQNSSFAVYDDKGVPVNYSLVTKNNRVRLPKGGVIVFLGSPNARFEVTYQDEVNASALTGTDRYETSIKISQAGWENAENAVLINDSAIADALAATPFAYKKNAPILLTGSSQINEKTLAELKRLKVKNVYVVGGEASINEKSLDTIKSNNISVSRISGSDRYQTSMNIAKELNNISNISKISVVNGEKGLADAVSIGAVSAQNDMPIILTNENSNITEINNLFKNKKIDKSYVIGGEYTVSKNIESKLQNPQRISGSTRNETNAKVIKEFYKDSKIDNLYVAKNGMNKQDDLIDGLSVGVLAGKTKSPVMLVGNSLDYNQKELFKTMRFKSVTQIGGNGNENSFK

SEQ ID NO: 291 - DNA, 2058 bp, Clostridium difficile
gataatacaaaagataattccgaaaaatatcaaagttctgatatagaattacatgattatagtaaaaacgcggaatcttacacaaaaactaaagctcttgctaaagagaaaattcaaactttgctatcaaagtatggtgctgtaagtgctcaatatgctttgattgataatggcaaaattgagatttctggtaatggtggagtttacagcaaacaggataacaaaaacttaaataaggataatatgtatagtatcgcatctatcagtaaaatgtttactacaacagctgttatgaagttggttgatgatggaaaattaaatttagatactcctgttgtaaagtatatacctgaatttaaaatggctgatgatagatacaaggaaatcactccaagaatgttattaaatcattcatcagggttgatgggaagtagttttaaaaacactattttattagcagacaatgattcttatggtcatgataatttcttaaaagaattacaaaaacaaagattaaaagctaaaccaggagctttttctgtttattgtaatgatggatttactttagctgaaattttagtagaaagagtatctggtatgtcatttactaattttcttgataaatacataaataatccacttaacttacaaaatacaaaaactccagaaaatagttttgatagttcaaaactagcaaaagcatacgtaccttattgggaagatgcagttccgcaagataaccttaatgctataggtgcaggtggtttatattcaagtgcagaaaatctatgtacatttgcacaaacatttatgaaaaattcaaatggtattctttctcctgcttcagtaaaagctatggaaaacaaagaatatttaaatggtctatggcctgaaggagaagattctatacttggatatggtttaggttgggattgtgtcaacacttatccatttaatcagtataatttaaaagctcttacaaaaggtggagactctttattattccacagtaatcttatagttcttccagatgaaaatatggcagttgcagttctttcttctggtggaagtagtcaacttaacgaaataattggacaagaaatcttactatctgcattaaaagaaaaaggtaaaattaaagaaataaaacctgataaaacatttagtaaaccacaacaagttaaaatgcctagctctctaaaagaaaatagtggtctttatgcttcttcaaatatgataaaagtagatgttaatgataatggtactttaacagtatcttctccttatatagaaaatggacctgaagataaatacgtatacataggtcaagatagatttgtatctgaaaaaggtaacagctgtctaaaatttgtaaaagaaaaaaacaatatcacatatttaaatatgagctcttatgatgatgtccctggattaggtcagacagcaagtttatactatgtagctcaaaagatagatgacaacaatatatcaaatagtgtaaaagaagcatggaaaaaaagaaatggtaaagattactatctagtagatgaaaaatatacttctcaaagctatatgtttggttctgtgaaggcaactcttgctctttctgatgaaactccaggttatatagttaacactaaaataatggatgagaataactcaaatgcttttatagaaatacctggtgtaataggtcgtgatttatccgacattaaacttcataaagaaaatggtacagagtatttatcttttggaacactaacgtatgttagtgaagattctataactaatttgccagcagaaaaatcttttacttgtgaactagaatccaatggttatgcaaaatggtataagattggtgacgatatcgcaaataaaaaaatagaagttaatcttcctcaaaattcatcttttgctgtttatgatgataaaggtgttcctgtaaactattctttagttacaaagaacaatagagttagattgccaaaaggaggcgtaattgttttcttaggaagtccaaatgctagatttgaggttacatatcaagatgaagtaaat

SEQ ID NO: 292 - protein, 686 aa, Clostridium difficile
DNTKDNSEKYQSSDIELHDYSKNAESYTKTKALAKEKIQTLLSKYGAVSAQYALIDNGKIEISGNGGVYSKQDNKNLNKDNMYSIASISKMFTTTAVMKLVDDGKLNLDTPVVKYIPEFKMADDRYKEITPRMLLNHSSGLMGSSFKNTILLADNDSYGHDNFLKELQKQRLKAKPGAFSVYCNDGFTLAEILVERVSGMSFTNFLDKYINNPLNLQNTKTPENSFDSSKLAKAYVPYWEDAVPQDNLNAIGAGGLYSSAENLCTFAQTFMKNSNGILSPASVKAMENKEYLNGLWPEGEDSILGYGLGWDCVNTYPFNQYNLKALTKGGDSLLFHSNLIVLPDENMAVAVLSSGGSSQLNEIIGQEILLSALKEKGKIKEIKPDKTFSKPQQVKMPSSLKENSGLYASSNMIKVDVNDNGTLTVSSPYIENGPEDKYVYIGQDRFVSEKGNSCLKFVKEKNNITYLNMSSYDDVPGLGQTASLYYVAQKIDDNNISNSVKEAWKKRNGKDYYLVDEKYTSQSYMFGSVKATLALSDETPGYIVNTKIMDENNSNAFIEIPGVIGRDLSDIKLHKENGTEYLSFGTLTYVSEDSITNLPAEKSFTCELESNGYAKWYKIGDDIANKKIEVNLPQNSSFAVYDDKGVPVNYSLVTKNNRVRLPKGGVIVFLGSPNARFEVTYQDEVN

SEQ ID NO: 293 - DNA, 879 bp, Clostridium difficile
aatgcaagtgcacttacaggaactgatagatatgaaacttctattaagataagtcaagcaggttgggaaaatgctgaaaatgcagttttaataaacgattcagcaattgcagatgctttggctgcaacaccatttgcatacaagaaaaacgctcctatattattgactggaagctctcaaataaatgaaaaaactttggctgaattaaagagattaaaagttaaaaatgtatatgtagttggtggagaggcttctataaatgaaaaatctttagatactataaaatcaaacaatatctctgtatctagaatttcaggaagtgatagatatcaaacttctatgaacattgctaaagaattgaacaatattagcaatatatcaaagatttcagtagttaatggcgaaaaaggattagccgatgcagtaagcattggagctgtatcagctcaaaatgatatgcctataatacttactaatgaaaatagtaatataactgaaataaataacttgtttaaaaacaaaaagattgataaatcttatgtaatcggtggagaatatacagtttctaaaaatatagaaagtaaacttcaaaatccacagagaatatcaggtagcactagaaatgaaactaatgcaaaagtaataaaagaattttacaaggattctaagatagacaatttatatgttgctaaaaatggaatgaataaacaagatgatttaatagacggattatctgttggagttttggctggaaaaactaaatctcctgtaatgctagtaggaaactcactagattataatcaaaaagaactatttaaaactatgagatttaaatctgtaacacaaattggtggaaatggaaatgaaaactcatttaag

SEQ ID NO: 294 - protein, 293 aa, Clostridium difficile
NASALTGTDRYETSIKISQAGWENAENAVLINDSAIADALAATPFAYKKNAPILLTGSSQINEKTLAELKRLKVKNVYVVGGEASINEKSLDTIKSNNISVSRISGSDRYQTSMNIAKELNNISNISKISVVNGEKGLADAVSIGAVSAQNDMPIILTNENSNITEINNLFKNKKIDKSYVIGGEYTVSKNIESKLQNPQRISGSTRNETNAKVIKEFYKDSKIDNLYVAKNGMNKQDDLIDGLSVGVLAGKTKSPVMLVGNSLDYNQKELFKTMRFKSVTQIGGNGNENSFK

SEQ ID NO: 295 - DNA, 1440 bp, Clostridium difficile
atgagaacaattagaagagttttagcattaggtttaacattagctatatttctaataaatgtacctaatgtagatgcattaacatcagatacaattaaaggtaacaatatatatgagacggctggattaatagcagataaaaagagttatgatacagcaattatggtaaatatggataattctatagcagatggtctttcagcaagtggtcttgcaggtgctgttgatgctccaattttgcttgcacaaaaaaataagataccaaatgaaacaaaacaaagattaaaaaatgttaaaaagatatacataataggtaaagaattatcaataagtaagtcagtagaaactgaactaaaaaacacaggggcacaggtaactagattaggtggagatgacagaataaagactagttatagtgttgctaaagaggtaaatggtatcaaaaaagttgatgaagtgatattaactaatgcatataaaggagaagcagatacaataagtgctgcacctgtatcagtaagagatatagctcctatagtacttacagatggaaagagtgtgcctttttcaacaagcaatgtaaaaacatatgcagtaggtgggagtatatcaatgagcactagtttagttaataaaactaatgctaaaagacttggtggttcagatagatatgatacaaataagaaagttataaaagagttttatccagatgcatcagaattttatttgagtgatggatatgatttagtaaatgcacttacaggttctacaattgctaaggaaaatccaattgtattggtgtcagaaagtagtgataagtctatattagcaggagcagataagattactagattaggttcaataagtgacagtgtgtataataagtgtgtttctgctgcacaaaataatggcgattcgtctacaaaaggtgagtcacctatgaaaaatgagacaagcatattaggtcagccaacagctagtttagaagcgtgcttaaaatgggcaaaatctaaaaaagctaatgatttatttatagagttaataccaatattatatgatactgctgttcaggaaggtgttaatcctgttttggcagtagctcaatctgcaaaagaaactggtttttgtaattttggtggagtattagatgcatcatttaagaatccttgtggacttaaaacttctgtaggtggttctgatactgataagaatgcccattcaagatttgatacttgggaagaaggaatattagctcaaattcaacatttatgcttatatgcaggacaagatggttacccactttcaaatccagtagaccctagacatgaaaaatctttatttggtaaggctaaaacagttgaaagtttatctaataattgggctggaggtcaatatggacaagatttagtaagaatgatgggagaaattgaggcaacaaaa

SEQ ID NO: 296 - protein, 480 aa, Clostridium difficile
MRTIRRVLALGLTLAIFLINVPNVDALTSDTIKGNNIYETAGLIADKKSYDTAIMVNMDNSIADGLSASGLAGAVDAPILLAQKNKIPNETKQRLKNVKKIYIIGKELSISKSVETELKNTGAQVTRLGGDDRIKTSYSVAKEVNGIKKVDEVILTNAYKGEADTISAAPVSVRDIAPIVLTDGKSVPFSTSNVKTYAVGGSISMSTSLVNKTNAKRLGGSDRYDTNKKVIKEFYPDASEFYLSDGYDLVNALTGSTIAKENPIVLVSESSDKSILAGADKITRLGSISDSVYNKCVSAAQNNGDSSTKGESPMKNETSILGQPTASLEACLKWAKSKKANDLFIELIPILYDTAVQEGVNPVLAVAQSAKETGFCNFGGVLDASFKNPCGLKTSVGGSDTDKNAHSRFDTWEEGILAQIQHLCLYAGQDGYPLSNPVDPRHEKSLFGKAKTVESLSNNWAGGQYGQDLVRMMGEIEATK

SEQ ID NO: 297 - DNA, 1575 bp, Clostridium difficile
atgaaagcaccaaaaactattttaacaatactgacaatagcgcttactttaagtagcatttctataataccatcatatgcacttacagaggaaaaattaataggtaatggtagatatgaaactgctgtaaagataagtcaaaaggcatacagttctagtcctaatgtagtgctagttaatgacaattcattagctgatgcactttcagctacaccatttgcaaaggctaaaggagcaccaatacttttgacagaaagtgataagctagatgataggactgaaaaagagataaaacgtctaggagctaaagatatttatttgataggaggtactgctgtacttaataaagatatagagaacaagttaaaaggtaatggacttaatgtagaaagaattaatggtaagaatagatatgaaacttcactgattttggctaataagcttaaggatataaaagatattaaggaagttgctgtagtaaatggtgaaaaaggattaagtgatgctgttagtgttggagcaccagcagctcaaaataagatgcctataattttgtctaaccctaaggacggagtagaagcatttgataaatttataagggatgagaaagttataaaagcatatgtaattggaggtacaaattctgtttcaagagctgtagaaaagagtcttcctaatgcagaaagagtgagtgggaaagatagaaatgagactaatgctaaagttatagaaaagttttacactgatacaaatttaagtaatttatatgtaactaaggatggtagtaaaaatgagaatcaactaatagactcgttagctgttggagtattggctgcaaaaaatgagtctcctattgttttggttggcaataaattaaacacaaaacaaagagatatacttagtactaaaaaattaaatactataacacaggtaggtggaaatggaaatgaagaagcttttgatgaaattaaaagtctacaagaaaaaactgtgtttgaagcgaaaactgttgaagaattaactgatatgataaatatagcaagtcctaatgatattataaactttaaaccaaaggagaatactgtaaatgaagcttttagaatggtaacaaataaaccaataactgtgaatataaagggtgattgttcaaagactcttacagtagatatgcctaatggtgaagtgaataactatgctactttggtaaatgttatagttagaaatattggagaaggtggatttaataatcatgatacaatcactatattgtcagttcgtgacaaaaatggtagagttatagaaaatactagaaattcagatatagatacgttgatgatattagcttctgctaatgatacaaaattgattaatgatggatatataggaaaacttatagataattcatctaatagtgatataactaataatggtactatagataaaaaagttaatcaggttgaagatttagaggctaaagtagattcaattgaaaaagctatagattctataagtcaaaaagtcaataaaatacaagatatactagataagcttggatttctaaagaaatttcttagc

SEQ ID NO: 298 - protein, 525 aa, Clostridium difficile
MKAPKTILTILTIALTLSSISIIPSYALTEEKLIGNGRYETAVKISQKAYSSSPNVVLVNDNSLADALSATPFAKAKGAPILLTESDKLDDRTEKEIKRLGAKDIYLIGGTAVLNKDIENKLKGNGLNVERINGKNRYETSLILANKLKDIKDIKEVAVVNGEKGLSDAVSVGAPAAQNKMPIILSNPKDGVEAFDKFIRDEKVIKAYVIGGTNSVSRAVEKSLPNAERVSGKDRNETNAKVIEKFYTDTNLSNLYVTKDGSKNENQLIDSLAVGVLAAKNESPIVLVGNKLNTKQRDILSTKKLNTITQVGGNGNEEAFDEIKSLQEKTVFEAKTVEELTDMINIASPNDIINFKPKENTVNEAFRMVTNKPITVNIKGDCSKTLTVDMPNGEVNNYATLVNVIVRNIGEGGFNNHDTITILSVRDKNGRVIENTRNSDIDTLMILASANDTKLINDGYIGKLIDNSSNSDITNNGTIDKKVNQVEDLEAKVDSIEKAIDSISQKVNKIQDILDKLGFLKKFLS

SEQ ID NO: 299 - DNA, 660 bp, Clostridium difficile
atgagaccaagtaaaaaattattaatagctataatatcaatattcttaataagttcagttccagtaagtgcacatgcagatagtactactatacaacaaaataaagacacacttagtcaaatagtagtttttccaactggaaattacgataaaaacgaagctaatgctatggtaaatagattagctaatatagatggaaagtatttaaatgcattaaagcaaaataacttaaaaataaaattattaagtggaaagttaacagatgaaaaagaatatgcttatttaaaaggtgtagttcctaagggatgggaaggtactggaaaaacttgggatgatgttccaggtttaggtggaagtacagtagctcttagaataggatttagtaacaaaggtaaagggcatgatgcaataaatttagaattacatgaaacagcacatgcaatagaccatatagtattaaatgatatatctaaatcagcacaattcaaacaaatatttgctaaagaaggtcgttctttaggtaatgtaaactacttaggtgtatatccagaagaattttttgcagaatcatttgcatattactatttaaatcaagatacaaatagtaagttaaaatcagcttgtccacaaacttatagctttttgcaaaatttagctaaa

SEQ ID NO: 300 - protein, 220 aa, Clostridium difficile
MRPSKKLLIAIISIFLISSVPVSAHADSTTIQQNKDTLSQIVVFPTGNYDKNEANAMVNRLANIDGKYLNALKQNNLKIKLLSGKLTDEKEYAYLKGVVPKGWEGTGKTWDDVPGLGGSTVALRIGFSNKGKGHDAINLELHETAHAIDHIVLNDISKSAQFKQIFAKEGRSLGNVNYLGVYPEEFFAESFAYYYLNQDTNSKLKSACPQTYSFLQNLAK

SEQ ID NO: 301 - DNA, 2385 bp, Clostridium difficile
gtgaaaaaatttacttcaaaaaaagtaacaaggtttgttgcgctgtttttaatatctattttagtaatgtcaacaattcctgtatcagctgacaatagcaatacattgaatcagataaaaaaagcagaatacagtgagacgtataaacaatatctaaatgatgctaaaaatggacgtacagaaaaatataatgggattataccaaatccatatcagttggaaggtactcaaatccaaagtaaaggaagaacagctccaacatcttatgaccctagaaaattaggtcttatgacatcaataaaaaatcaagaggatttaggaatctgttgggattttgctgcaatggcaaccttagaaagtttcttaaagttaaataattatggagactatgatttatcagaagaacacttaagatggtgggcttcagatggtgaatatggatggtctgtagatgatatgaatggtgctttaaattatgaagctatgggatatttaacatcttggtcaggtcctaaattagaaaaagatatcccatacaatggtagagtatctaaagcacaaggagcaaaaaaaccaactaatatgaatacagcacctactgtttttaatgtgacagatgctgtgtgtgtaagtaatgacataaattctacaaaaaatgctatattacagtatggagcagtaacatctggttattatgaagatattaaatatcaaagtgatgaccaaaattcatattattgtccaacaaaaagttttaatacaaatcatgctatttcaattgtaggttgggatgataactattctaaagataattttaatgcaaatattagaccatcaaaaaatggtgcttggttaataaaaaatagctggggagattataattctgagggtggatatttctggatatcttatgaagacaagacacttatgtctgatatagataatttttcaatcaaaggtggtaaaaaaccaaatgatgatgagaagatgtatcaacatgactatgcaagtattgtacctttaatttcaaaaaagataacagctgcaaatgtatttgatttcaatagaggcgatgaaactctaaaatctgtaatgttcttaactgaaagtataggagctaagtatgaagtatattatgctccagtagtaaatggtatacctcaagaaaacaatatgaaaaaattaaaagaaggtactgcccaatattcaggatacataacagttccaattgattcttttgatataccagaaggaaagggtgcaattgtagtcagcatagaggggaaaaatggagagtcaactataggttctgagtcaaatgtaccaggatatgatacatttaaagcaaaagctaatttaggtgaaagttatatcatagataatactggaaaattctttgatataaatagagatagtaacttctatccatgtaattttactataaaagctgttacagaaaagtcttctggtgagagtatcccaaatgagtctttaattggtagtgatagatatgaaactgctatcaaagttagtcaaaatggtttcaattcttcagaaaatgtagttttagtaaatggcagttcaatagtagatgcattggcagcaactccttttacatctgctataaattcaccaatattattgacacaaaaagaagctttaaattcaaaaactaaagctgagatacagagattaggtgctaagaaagtatacctaataggtggagaaaattctataagtaaagaaattgaacaacaattaaaaagcttaaatatatcgatagagagaatatcaggaagtgatagatacaagacaagtttattattagctcaaaagttaaatggtataaaaaatgtatctcaaatagcagttgtaaatggagtgaaaggattagctgatgcaattagtgtaggcgctgcagcagcagaaaataacataccaatcatacttgcaaatgaaaagagcgaattgcaaggagctgatgaatttctaaattcattaaatatagagaaatcttatattattggaggaacagcatccctatcaaacaatctagaaagtaagttaaaaaatccaactagattatctggtagtagtagagacgaaactaattcaaagataatagataatttttataaaaaagatactttaaaaaatgcatttgtagttaaaaatggaatcaagaatcaaaatgatttaatagatggattggcagttggtcctttaggagcaaaaactgggtcaccagtaattttagttggtgataaattagctgatagccaaaaagaagttcttaaaaataagactttagaaaaagtaactcaagttggtggaggagcaaataaaaatgcatttaaagagttagtaaaattaaaaagtgctaaa

SEQ ID NO: 302 - protein, 795 aa, Clostridium difficile
MKKFTSKKVTRFVALFLISILVMSTIPVSADNSNTLNQIKKAEYSETYKQYLNDAKNGRTEKYNGIIPNPYQLEGTQIQSKGRTAPTSYDPRKLGLMTSIKNQEDLGICWDFAAMATLESFLKLNNYGDYDLSEEHLRWWASDGEYGWSVDDMNGALNYEAMGYLTSWSGPKLEKDIPYNGRVSKAQGAKKPTNMNTAPTVFNVTDAVCVSNDINSTKNAILQYGAVTSGYYEDIKYQSDDQNSYYCPTKSFNTNHAISIVGWDDNYSKDNFNANIRPSKNGAWLIKNSWGDYNSEGGYFWISYEDKTLMSDIDNFSIKGGKKPNDDEKMYQHDYASIVPLISKKITAANVFDFNRGDETLKSVMFLTESIGAKYEVYYAPVVNGIPQENNMKKLKEGTAQYSGYITVPIDSFDIPEGKGAIVVSIEGKNGESTIGSESNVPGYDTFKAKANLGESYIIDNTGKFFDINRDSNFYPCNFTIKAVTEKSSGESIPNESLIGSDRYETAIKVSQNGFNSSENVVLVNGSSIVDALAATPFTSAINSPILLTQKEALNSKTKAEIQRLGAKKVYLIGGENSISKEIEQQLKSLNISIERISGSDRYKTSLLLAQKLNGIKNVSQIAVVNGVKGLADAISVGAAAAENNIPIILANEKSELQGADEFLNSLNIEKSYIIGGTASLSNNLESKLKNPTRLSGSSRDETNSKIIDNFYKKDTLKNAFVVKNGIKNQNDLIDGLAVGPLGAKTGSPVILVGDKLADSQKEVLKNKTLEKVTQVGGGANKNAFKELVKLKSAK

SEQ ID NO: 303 - DNA, 1884 bp, Clostridium difficile; identical to SEQ ID NO: 192

SEQ ID NO: 304 - protein, 628 aa, Clostridium difficile; identical to SEQ ID NO: 193

SEQ ID NO: 305 - DNA, 1569 bp, Clostridium difficile
atgaagaataaaaaggctgcgggagtaattcttggagcagtgcttttgatagtgggagtagtaatctctttatttgcaggtagtaagattgtatttgcacaaggagggttgtttacgacacttgtaaatccgatagaagccgttgctcaaataaaagtagaagtagaagttaatgttaagtatatttttgaagatgaaaaagtctttaaggaggaaaagattaaggctgaaaaggggcggcttcttgacagtggagatcttccaataattcctgatgatatgaaatttatagatgactttctattttatgaagtaaagggagacgggaaagatgaaattatccgtaaagttacaaagattgatgttaaggataaggaaacgcaaacagaaaatgaaagctcaaaatctgagcaaagctctcaatcaaatgcttcaaagatagaaaataagggaactcaaacagagcttagcaaagatgatatttctaaaatggaaaaggagtctaaggaacttaaagaaaaacttgataagctaaatcaggagattaaggacaaggataaactaagcgagaagcaaaaggataaaatcaaagaccttgaggagaaaatagataaactgaaggaaaaacttgaaaagggcaaagatgataaggacttatcagcagatatgaaaaaggagatagacaagctaactgataagattaaggaacttgagaaaaaggctaatgaggtcggtagagctcctgttatgcataatcctactgtaacaccaattagccctatttccggaattaaacaaggaacaggaaatgtatcaccacaaacatctataaatagcagtggtaaaggttctgccacgcaggaaagtaaaggggcaaatacaaaagatacaaacagcaatgaatcaaaggagaaagaaaagcaagtttgttatccaaataagctgacaccaaaacagcctgctaataatggtagtcatgattcttctctggatggttcaagtaagaatataaataccaacaaaggagttgcttcagaaccttcaaaggcacgaggaacagttactgaaaataaggataatgcaaacaaaaattatcctattcaccataatgacagtaaagataataaagaaacggataaatattctgctgatgcaagacagtttgttacctttacaactaaaaatggtaagacctttcatttaatcattaaccatgatgaggatagcgagaaggttatgctcctaactgaagtatctgaagatgatctcttaaatatggtagaaaagaaagcaccggagaaagagattgttaaagaagaatcacaaaaagaagagcctaaacaagtgaaaaaagaagaaagcagtaatacaggaacctacttaattctcattcttgtagtagcgggagccttaggtgcaggatattattttaaggttattaagaaaaaagaagataaggagcttgaaggctttgaggaggaagatgatgatttcttttcagaggcagaagaaagcgaaaatgaagtaaacgaagcagtaacagaagataaagaagatgatgagatagag

SEQ ID NO: 306 - protein, 523 aa, Clostridium difficile
MKNKKAAGVILGAVLLIVGVVISLFAGSKIVFAQGGLFTTLVNPIEAVAQIKVEVEVNVKYIFEDEKVFKEEKIKAEKGRLLDSGDLPIIPDDMKFIDDFLFYEVKGDGKDEIIRKVTKIDVKDKETQTENESSKSEQSSQSNASKIENKGTQTELSKDDISKMEKESKELKEKLDKLNQEIKDKDKLSEKQKDKIKDLEEKIDKLKEKLEKGKDDKDLSADMKKEIDKLTDKIKELEKKANEVGRAPVMHNPTVTPISPISGIKQGTGNVSPQTSINSSGKGSATQESKGANTKDTNSNESKEKEKQVCYPNKLTPKQPANNGSHDSSLDGSSKNINTNKGVASEPSKARGTVTENKDNANKNYPIHHNDSKDNKETDKYSADARQFVTFTTKNGKTFHLIINHDEDSEKVMLLTEVSEDDLLNMVEKKAPEKEIVKEESQKEEPKQVKKEESSNTGTYLILILVVAGALGAGYYFKVIKKKEDKELEGFEEEDDDFFSEAEESENEVNEAVTEDKEDDEIE

SEQ ID NO: 307 - DNA, 2274 bp, Clostridium difficile
atgaataagaagaatatagcaatagctatgtcaggattaacagtattagcttctgcagcacctgtgtttgcagcagaagatatgtcgaaagttgagactggtgatcaaggatatacagtagtacagagcaagtataagaaagcagttgaacaattacaaaaagggttattagatggaagtataacagagattaaaattttctttgagggaactttagcatctactataaaagtaggagctgagcttagtgcagaagatgcaagtaaattattgtttacacaagtagataataaattagacaatttaggtgatggggattatgtagatttcttaataagctctccagcagagggagataaagtaactacaagtaaacttgttgcattaaaaaatttaacaggtggaactagtgcaataaaagtagctacaagtagtattattggtgaagtcgaaaatgctggtactccgggagcaaaaaatacagctccaagtagtgctgcagttatgtctatgtcagatgtatttgatacagcttttacagattcaactgaaactgctgtgaaacttactataaaagatgctatgaaaactaaaaagtttggtttagttgatggaactacttattcaacaggtcttcaatttgcagatggaaaaacagaaaaaattgttaaattaggagatagtgatactataaatttagccaaagaattaataataacacctgcaagtgcaaatgatcaagctgcgactattgagtttgctaaaccaacaacacaatctggaagcccagtaataactaaacttagaatattgaatgcaaaagaagagacaatagatattgatgctagttctagtaaaacagcacaagatttagctaaaaaatatgtatttaataaaacagatttaaatactctttacagagtattaaatggggatgaagcagatactaatagattagtagaagaagttagtggaaaatatcaagtggttctttatccagaaggaaaaagagttacaactaagagtgctgcaaaggcttcaattgctgatgaaaattcaccagttaaattaactcttaagtcagataagaagaaagacttaaaagattatgtggatgatttaagaacatataataatggatattcaaatgctatagaagtagcaggagaagatagaatagaaactgcaatagcattaagtcaaaaatattataactctgatgatgaaaatgctatatttagagattcagttgataatgtagtattggttggaggaaatgcaatagttgatggacttgtagcttctcctttagcttctgaaaagaaagctcctttattattaacttcaaaagataaattagattcaagcgtaaaagctgaaataaagagagttatgaatataaagagtacaacaggtataaatacttcaaagaaagtttatttagctggtggagttaattctatatctaaagaagtagaaaatgaattaaaagatatgggacttaaagttacaagattagcaggagatgatagatatgaaacttctctaaaaatagctgatgaagtaggtcttgataatgataaagcatttgtagttggaggaacaggattagcagatgccatgagtatagctccagttgcatctcaattaagaaatgctaatggtaaaatggatttagctgatggtgatgctacaccaatagtagttgtagatggaaaagctaaaactataaatgatgatgtaaaagatttcttagatgattcacaagttgatataataggtggagaaaacagtgtatctaaagatgttgaaaatgcaatagatgatgctacaggtaaatctccagatagatatagtggagatgatagacaagcaactaatgcaaaagttataaaagaatcttcttattatcaagataacttaaataatgataaaaaagtagttaatttctttgtagctaaagatggttctactaaagaagatcaattagttgatgctttagcagcagctccagttgcagcaaactttggtgtaactcttaattctgatggtaagccagtagataaagatggtaaagtattaactggttctgataatgataaaaataaattagtatctccagcacctatagtattagctactgattctttatcttcagatcaaagtgtatctataagtaaagttcttgataaagataatggagaaaacttagttcaagttggtaaaggtatagctacttcagttataaataaattaaaagatttattaagtatg

SEQ ID NO: 308 - protein, 758 aa, Clostridium difficile
MNKKNIAIAMSGLTVLASAAPVFAAEDMSKVETGDQGYTVVQSKYKKAVEQLQKGLLDGSITEIKIFFEGTLASTIKVGAELSAEDASKLLFTQVDNKLDNLGDGDYVDFLISSPAEGDKVTTSKLVALKNLTGGTSAIKVATSSIIGEVENAGTPGAKNTAPSSAAVMSMSDVFDTAFTDSTETAVKLTIKDAMKTKKFGLVDGTTYSTGLQFADGKTEKIVKLGDSDTINLAKELIITPASANDQAATIEFAKPTTQSGSPVITKLRILNAKEETIDIDASSSKTAQDLAKKYVFNKTDLNTLYRVLNGDEADTNRLVEEVSGKYQVVLYPEGKRVTTKSAAKASIADENSPVKLTLKSDKKKDLKDYVDDLRTYNNGYSNAIEVAGEDRIETAIALSQKYYNSDDENAIFRDSVDNVVLVGGNAIVDGLVASPLASEKKAPLLLTSKDKLDSSVKAEIKRVMNIKSTTGINTSKKVYLAGGVNSISKEVENELKDMGLKVTRLAGDDRYETSLKIADEVGLDNDKAFVVGGTGLADAMSIAPVASQLRNANGKMDLADGDATPIVVVDGKAKTINDDVKDFLDDSQVDIIGGENSVSKDVENAIDDATGKSPDRYSGDDRQATNAKVIKESSYYQDNLNNDKKVVNFFVAKDGSTKEDQLVDALAAAPVAANFGVTLNSDGKPVDKDGKVLTGSDNDKNKLVSPAPIVLATDSLSSDQSVSISKVLDKDNGENLVQVGKGIATSVINKLKDLLSM

SEQ ID NO: 309 - DNA, 1272 bp, Clostridium difficile
atgcaagatggtttcttaacagtaagcataattgatgctactaacaatagacctattcaaaatgcagtagtaaacatatattcaatgtctaatggtagccaaagctcatcaactttataccaaaacctaagaagtaatgaatctggtcaagtgactggtttagtattaccagcaccagatgtagattactctctacaaccatctgatgttagaccttatagccagtatatagtggaagccatagcagatggatatgagacagttgtcatagaaggaacacagttgttagctacaattgaagcaagacaaggagttcccatgtctcctagaacaagaagtaagcgttctttctcaagacaaagtgagttgatttttgatataggagaacatactctatatggtacttatcctcctaagattccagaaagtaacttaaaaccattacctcctcctactggtttcgttgtattagataaccctgtagtgcctgaatttatagtagttcatgatggtttgccagaagattcatcagctccaaactattggattccatttaaagagtacattaaaaacatagcgtcatctgaaatatattcaacttggcctgaacagacaatttatgcaaatgtaatagctataatatcatttactttaaatagagtctttactgaatggtatagaaataaaggatataactttacaataacttcaacaacagcatacgaccataagtttataaataatagaaacttatttgaaccaattaacgtagttgtagatgctatttttaatacttttataaaaagacctcctacatcaagacagccactattagcacaatattgtgatggacaaaaatcccaatgtcctgaccaaatgactcaatggggcagtaaagacttaggtgaccaaggatatgactatgagagtatactaagatatttctatggagatgaaatagtatttgaaagagcacctatagtaagtggtgtaccagtgtcattccctggtactacactacaagttggttcttctgggcagtatgttagaaccatacaaaatcagttaaatgctatatctaattcttatccagctgtaccaaaagttatagaagatggtatctatggaacagatacagaaaacgctgttaagatattccaaggaatctttggtttacctcaaagcggagtagtagattttaaaacatggtatgaaatatccagagtttatgtagctacaactagaatagcttctttaaatcctttaatttaa

SEQ ID NO: 310 - protein, 423 aa, Clostridium difficile
MQDGFLTVSIIDATNNRPIQNAVVNIYSMSNGSQSSSTLYQNLRSNESGQVTGLVLPAPDVDYSLQPSDVRPYSQYIVEAIADGYETVVIEGTQLLATIEARQGVPMSPRTRSKRSFSRQSELIFDIGEHTLYGTYPPKIPESNLKPLPPPTGFVVLDNPVVPEFIVVHDGLPEDSSAPNYWIPFKEYIKNIASSEIYSTWPEQTIYANVIAIISFTLNRVFTEWYRNKGYNFTITSTTAYDHKFINNRNLFEPINVVVDAIFNTFIKRPPTSRQPLLAQYCDGQKSQCPDQMTQWGSKDLGDQGYDYESILRYFYGDEIVFERAPIVSGVPVSFPGTTLQVGSSGQYVRTIQNQLNAISNSYPAVPKVIEDGIYGTDTENAVKIFQGIFGLPQSGVVDFKTWYEISRVYVATTRIASLNPLI

SEQ ID NO: 311 - DNA, 948 bp, Clostridium difficile
gatgaagtaaatgattcatctcaaaataaggatgataaaacaaatactgaattaaatttaggtgaatataaagaagtaaaatataaagttgcaaaaataaaagatggagtagctataaagataagagaagaaggtcaagttcaaaacatagcttattctggagatgaatttacggttttaggaactcaaggagaatgggttaaggttaaagttgaagatggcgaaggttggttagctactagatatgtagatatatctgaaggtgtaggatatactaacgctgataaagtaaacttaagaaaagataagagtgaaagttcagaagtaattgaagagctggaaaaaggaagttctttattggttttggaagataatggagattggttaaaagttaaagatggggaaacagaaggatatgtaaaatcatcttatatatctgataaagctcctgtaatagaagagccacaagtaaacccaagtattgaccaaaatgtagattctacaaataataatcaacaaaacaatgcaaatactaatcaacaaaataataattcaaatgtgccaacagctaactctaatgcagttcaagctgtacttaacttggcatattctaagcaaggttgtccatatgtttggggagcagaaggaccaaacacttttgactgttctggatttacacaatatgtgtatagaaatgcagtaggaaagaatataccaagaacatctaaagcacaatctaaatatggacaaactgtaagtaaagcaaatttacaaccaggagacttagtattcttcacaactaatggttctggttctgttagtcatgttggaatatatgtaggtgggggtaatatgatacattcaccatcaacaggaaaaacagttagtgtaactagtataaattcatcatactatacagcaagatttgttacagcaaaaagaatatta

SEQ ID NO: 312 - protein, 316 aa, Clostridium difficile
DEVNDSSQNKDDKTNTELNLGEYKEVKYKVAKIKDGVAIKIREEGQVQNIAYSGDEFTVLGTQGEWVKVKVEDGEGWLATRYVDISEGVGYTNADKVNLRKDKSESSEVIEELEKGSSLLVLEDNGDWLKVKDGETEGYVKSSYISDKAPVIEEPQVNPSIDQNVDSTNNNQQNNANTNQQNNNSNVPTANSNAVQAVLNLAYSKQGCPYVWGAEGPNTFDCSGFTQYVYRNAVGKNIPRTSKAQSKYGQTVSKANLQPGDLVFFTTNGSGSVSHVGIYVGGGNMIHSPSTGKTVSVTSINSSYYTARFVTAKRIL

SEQ ID NO: 313 - DNA, 1509 bp, Clostridium difficile
acaatatcaaattttagcttatcttcatatgcatcagaaattacttccagcacagataaggtattaatcatatatgattctaagaaagaaacagcttataatagagatattttaaatattatgaggactctattgggaagatttagttcagatatagagctattaaaattgagtaactatgatggtgagataaataaaaattattacagtcatatatttattttaggaatcaatgaaaactcatataataatgataaaaacactaaaaacttgattagttccttaaattcatataaaggaactatatgttggttaggatatggtatagaaaatcttttggaacataaaaaatacaatttagactatgtaggaaaaacaaacaatatagttagtgtaaattatagaggtaaatcatataacttggatgaacattatgtttttaacattgtagaatcaaaagatacaagtaataaagtaataggaagtattaatgataccttaaataagtatccatatataataaatgataaaaatcttttttatgtatcaaaattagatttagatggagttttattttatatattttgcgattcacttaatgatatttttaatattaagacgtttgataaaggacgtatatttgtaagaatagaagatgtacatgcttttagagaaccaaaaaatcttgtagagatagcggattatttaagtagtaagaatataccatttacgattgcattaataccagcatatgtaaatcctaaaaatcataaggtaataactttatcagaaagccctgaaattgtcaaagcaataaaatatatgcaagataaaggtggaactgtgatattgcatggatatactcatcaatacaagaaagaagaagtttctggagaagggtatgaattttgggatggtaaaaaagatgaacccttaaaagaaaatatgaagatatttgtcaaagatagagttttgaatggtcttagagtatgtatagagaatggaatttatcctcttgcatttgaagcgccacattatgcaatggaatcagagggatataaagaattaaaaaaatatttttctacttatatggggcaacatcaaaataatgataaaaaatttagcacaaatacatatccttatattattagggatacagaagagtttaatatatttatacccgaaaatttaggatatatagacccagaagataagtttacttttcaaaatataaaagaaaatttagataaattatccattgtaagaggttttagtggagggttcttctttcattcatatttaaacatagagtatctaaaaaacacaatagaatatttagaaaaacagaatatagaatttatgaatttaagagattttaataattgggtaaaagttgatgaaatacaaataagaaatagtggagatgaaattatagtcaactatgataaggacttagatgaaataactaaaagtgatactagatttaaatccatatccaatattagtaaa

SEQ ID NO: 314 - protein, 503 aa, Clostridium difficile
TISNFSLSSYASEITSSTDKVLIIYDSKKETAYNRDILNIMRTLLGRFSSDIELLKLSNYDGEINKNYYSHIFILGINENSYNNDKNTKNLISSLNSYKGTICWLGYGIENLLEHKKYNLDYVGKTNNIVSVNYRGKSYNLDEHYVFNIVESKDTSNKVIGSINDTLNKYPYIINDKNLFYVSKLDLDGVLFYIFCDSLNDIFNIKTFDKGRIFVRIEDVHAFREPKNLVEIADYLSSKNIPFTIALIPAYVNPKNHKVITLSESPEIVKAIKYMQDKGGTVILHGYTHQYKKEEVSGEGYEFWDGKKDEPLKENMKIFVKDRVLNGLRVCIENGIYPLAFEAPHYAMESEGYKELKKYFSTYMGQHQNNDKKFSTNTYPYIIRDTEEFNIFIPENLGYIDPEDKFTFQNIKENLDKLSIVRGFSGGFFFHSYLNIEYLKNTIEYLEKQNIEFMNLRDFNNWVKVDEIQIRNSGDEIIVNYDKDLDEITKSDTRFKSISNISK

SEQ ID NO: 315 - DNA, 975 bp, Clostridium difficile
gacactattagtaaaaatcaaaatgcacaggtagatatgaacaattatcttcaaggtagaaaatctccaaaggaggaaaaacttattggtgaagatagatttgatacagcgataaaaatatctcaaagtggttggaataatggttcagaaagggtgtttctagttaactcaaattcattgccagatgcattggcttcaactcctttggcaagtaaattggatgcaccaatactgcttacaaataaaaatagtataccatataatgtaacagaggaaataaaaaggcttaatccagcagaagttattttaattggaagtgaaggagctatttcatcaagtgtaaaagaatctcttgaagatatggaagtattagtcagtagaatcggtggagcagatagagaagaaacatctttacttcttactagacagctagatgatactggtgatttaggtgtctcaaaagtggcagtggttaatgggtataatggactggcagatgcaacttcaatatcaagcccagctgcaagtgataatacagctataatatatacaggtaaggatagcataagaagtgaggcaaagaattttattacacaaaactcaactaagacatacatagtaggtggggagtacagtataagtaaaaaacttgaaggacagttagtaaactcagaaagactagcagggacagatagaaaagatactaatgcgaaagttttagaaaagttttatggaaaatcaagtaaggttaataatatgtattttgcaaaagatggaagtggtagagaagctgatttagttgatgggcttgctgctggagtattagcatcaaaaacaaagtcacctgtagtacttgcaagtggaagtttaagtagtgcacagaaaagttttataaaaaaagtaaaggctgataaatttgtacaagttggtggaggtaaaaatagtaaaccatatgcagaagcattagccttacag

SEQ ID NO: 316 - protein, 325 aa, Clostridium difficile
DTISKNQNAQVDMNNYLQGRKSPKEEKLIGEDRFDTAIKISQSGWNNGSERVFLVNSNSLPDALASTPLASKLDAPILLTNKNSIPYNVTEEIKRLNPAEVILIGSEGAISSSVKESLEDMEVLVSRIGGADREETSLLLTRQLDDTGDLGVSKVAVVNGYNGLADATSISSPAASDNTAIIYTGKDSIRSEAKNFITQNSTKTYIVGGEYSISKKLEGQLVNSERLAGTDRKDTNAKVLEKFYGKSSKVNNMYFAKDGSGREADLVDGLAAGVLASKTKSPVVLASGSLSSAQKSFIKKVKADKFVQVGGGKNSKPYAEALALQ

SEQ ID NO: 317 - DNA, 1383 bp, Clostridium difficile
aatgtacctaatgtagatgcattaacatcagatacaattaaaggtaacaatatatatgagacggctggattaatagcagataaaaagagttatgatacagcaattatggtaaatatggataattctatagcagatggtctttcagcaagtggtcttgcaggtgctgttgatgctccaattttgcttgcacaaaaaaataagataccaaatgaaacaaaacaaagattaaaaaatgttaaaaagatatacataataggtaaagaattatcaataagtaagtcagtagaaactgaactaaaaaacacaggggcacaggtaactagattaggtggagatgacagaataaagactagttatagtgttgctaaagaggtaaatggtatcaaaaaagttgatgaagtgatattaactaatgcatataaaggagaagcagatacaataagtgctgcacctgtatcagtaagagatatagctcctatagtacttacagatggaaagagtgtgcctttttcaacaagcaatgtaaaaacatatgcagtaggtgggagtatatcaatgagcactagtttagttaataaaactaatgctaaaagacttggtggttcagatagatatgatacaaataagaaagttataaaagagttttatccagatgcatcagaattttatttgagtgatggatatgatttagtaaatgcacttacaggttctacaattgctaaggaaaatccaattgtattggtgtcagaaagtagtgataagtctatattagcaggagcagataagattactagattaggttcaataagtgacagtgtgtataataagtgtgtttctgctgcacaaaataatggcgattcgtctacaaaaggtgagtcacctatgaaaaatgagacaagcatattaggtcagccaacagctagtttagaagcgtgcttaaaatgggcaaaatctaaaaaagctaatgatttatttatagagttaataccaatattatatgatactgctgttcaggaaggtgttaatcctgttttggcagtagctcaatctgcaaaagaaactggtttttgtaattttggtggagtattagatgcatcatttaagaatccttgtggacttaaaacttctgtaggtggttctgatactgataagaatgcccattcaagatttgatacttgggaagaaggaatattagctcaaattcaacatttatgcttatatgcaggacaagatggttacccactttcaaatccagtagaccctagacatgaaaaatctttatttggtaaggctaaaacagttgaaagtttatctaataattgggctggaggtcaatatggacaagatttagtaagaatgatgggagaaattgaggcaacaaaa

SEQ ID NO: 318 - protein, 461 aa, Clostridium difficile
NVPNVDALTSDTIKGNNIYETAGLIADKKSYDTAIMVNMDNSIADGLSASGLAGAVDAPILLAQKNKIPNETKQRLKNVKKIYIIGKELSISKSVETELKNTGAQVTRLGGDDRIKTSYSVAKEVNGIKKVDEVILTNAYKGEADTISAAPVSVRDIAPIVLTDGKSVPFSTSNVKTYAVGGSISMSTSLVNKTNAKRLGGSDRYDTNKKVIKEFYPDASEFYLSDGYDLVNALTGSTIAKENPIVLVSESSDKSILAGADKITRLGSISDSVYNKCVSAAQNNGDSSTKGESPMKNETSILGQPTASLEACLKWAKSKKANDLFIELIPILYDTAVQEGVNPVLAVAQSAKETGFCNFGGVLDASFKNPCGLKTSVGGSDTDKNAHSRFDTWEEGILAQIQHLCLYAGQDGYPLSNPVDPRHEKSLFGKAKTVESLSNNWAGGQYGQDLVRMMGEIEATK

SEQ ID NO: 319 - DNA, 1509 bp, Clostridium difficile
ataccatcatatgcacttacagaggaaaaattaataggtaatggtagatatgaaactgctgtaaagataagtcaaaaggcatacagttctagtcctaatgtagtgctagttaatgacaattcattagctgatgcactttcagctacaccatttgcaaaggctaaaggagcaccaatacttttgacagaaagtgataagctagatgataggactgaaaaagagataaaacgtctaggagctaaagatatttatttgataggaggtactgctgtacttaataaagatatagagaacaagttaaaaggtaatggacttaatgtagaaagaattaatggtaagaatagatatgaaacttcactgattttggctaataagcttaaggatataaaagatattaaggaagttgctgtagtaaatggtgaaaaaggattaagtgatgctgttagtgttggagcaccagcagctcaaaataagatgcctataattttgtctaaccctaaggacggagtagaagcatttgataaatttataagggatgagaaagttataaaagcatatgtaattggaggtacaaattctgtttcaagagctgtagaaaagagtcttcctaatgcagaaagagtgagtgggaaagatagaaatgagactaatgctaaagttatagaaaagttttacactgatacaaatttaagtaatttatatgtaactaaggatggtagtaaaaatgagaatcaactaatagactcgttagctgttggagtattggctgcaaaaaatgagtctcctattgttttggttggcaataaattaaacacaaaacaaagagatatacttagtactaaaaaattaaatactataacacaggtaggtggaaatggaaatgaagaagcttttgatgaaattaaaagtctacaagaaaaaactgtgtttgaagcgaaaactgttgaagaattaactgatatgataaatatagcaagtcctaatgatattataaactttaaaccaaaggagaatactgtaaatgaagcttttagaatggtaacaaataaaccaataactgtgaatataaagggtgattgttcaaagactcttacagtagatatgcctaatggtgaagtgaataactatgctactttggtaaatgttatagttagaaatattggagaaggtggatttaataatcatgatacaatcactatattgtcagttcgtgacaaaaatggtagagttatagaaaatactagaaattcagatatagatacgttgatgatattagcttctgctaatgatacaaaattgattaatgatggatatataggaaaacttatagataattcatctaatagtgatataactaataatggtactatagataaaaaagttaatcaggttgaagatttagaggctaaagtagattcaattgaaaaagctatagattctataagtcaaaaagtcaataaaatacaagatatactagataagcttggatttctaaagaaatttcttagc

SEQ ID NO: 320 - protein, 503 aa, Clostridium difficile
IPSYALTEEKLIGNGRYETAVKISQKAYSSSPNVVLVNDNSLADALSATPFAKAKGAPILLTESDKLDDRTEKEIKRLGAKDIYLIGGTAVLNKDIENKLKGNGLNVERINGKNRYETSLILANKLKDIKDIKEVAVVNGEKGLSDAVSVGAPAAQNKMPIILSNPKDGVEAFDKFIRDEKVIKAYVIGGTNSVSRAVEKSLPNAERVSGKDRNETNAKVIEKFYTDTNLSNLYVTKDGSKNENQLIDSLAVGVLAAKNESPIVLVGNKLNTKQRDILSTKKLNTITQVGGNGNEEAFDEIKSLQEKTVFEAKTVEELTDMINIASPNDIINFKPKENTVNEAFRMVTNKPITVNIKGDCSKTLTVDMPNGEVNNYATLVNVIVRNIGEGGFNNHDTITILSVRDKNGRVIENTRNSDIDTLMILASANDTKLINDGYIGKLIDNSSNSDITNNGTIDKKVNQVEDLEAKVDSIEKAIDSISQKVNKIQDILDKLGFLKKFLS

SEQ ID NO: 321 - DNA, 582 bp, Clostridium difficile
gatagtactactatacaacaaaataaagacacacttagtcaaatagtagtttttccaactggaaattacgataaaaacgaagctaatgctatggtaaatagattagctaatatagatggaaagtatttaaatgcattaaagcaaaataacttaaaaataaaattattaagtggaaagttaacagatgaaaaagaatatgcttatttaaaaggtgtagttcctaagggatgggaaggtactggaaaaacttgggatgatgttccaggtttaggtggaagtacagtagctcttagaataggatttagtaacaaaggtaaagggcatgatgcaataaatttagaattacatgaaacagcacatgcaatagaccatatagtattaaatgatatatctaaatcagcacaattcaaacaaatatttgctaaagaaggtcgttctttaggtaatgtaaactacttaggtgtatatccagaagaattttttgcagaatcatttgcatattactatttaaatcaagatacaaatagtaagttaaaatcagcttgtccacaaacttatagctttttgcaaaatttagctaaa

SEQ ID NO: 322 - protein, 194 aa, Clostridium difficile
DSTTIQQNKDTLSQIVVFPTGNYDKNEANAMVNRLANIDGKYLNALKQNNLKIKLLSGKLTDEKEYAYLKGVVPKGWEGTGKTWDDVPGLGGSTVALRIGFSNKGKGHDAINLELHETAHAIDHIVLNDISKSAQFKQIFAKEGRSLGNVNYLGVYPEEFFAESFAYYYLNQDTNSKLKSACPQTYSFLQNLAK

SEQ ID NO: 323 - DNA, 2295 bp, Clostridium difficile
gacaatagcaatacattgaatcagataaaaaaagcagaatacagtgagacgtataaacaatatctaaatgatgctaaaaatggacgtacagaaaaatataatgggattataccaaatccatatcagttggaaggtactcaaatccaaagtaaaggaagaacagctccaacatcttatgaccctagaaaattaggtcttatgacatcaataaaaaatcaagaggatttaggaatctgttgggattttgctgcaatggcaaccttagaaagtttcttaaagttaaataattatggagactatgatttatcagaagaacacttaagatggtgggcttcagatggtgaatatggatggtctgtagatgatatgaatggtgctttaaattatgaagctatgggatatttaacatcttggtcaggtcctaaattagaaaaagatatcccatacaatggtagagtatctaaagcacaaggagcaaaaaaaccaactaatatgaatacagcacctactgtttttaatgtgacagatgctgtgtgtgtaagtaatgacataaattctacaaaaaatgctatattacagtatggagcagtaacatctggttattatgaagatattaaatatcaaagtgatgaccaaaattcatattattgtccaacaaaaagttttaatacaaatcatgctatttcaattgtaggttgggatgataactattctaaagataattttaatgcaaatattagaccatcaaaaaatggtgcttggttaataaaaaatagctggggagattataattctgagggtggatatttctggatatcttatgaagacaagacacttatgtctgatatagataatttttcaatcaaaggtggtaaaaaaccaaatgatgatgagaagatgtatcaacatgactatgcaagtattgtacctttaatttcaaaaaagataacagctgcaaatgtatttgatttcaatagaggcgatgaaactctaaaatctgtaatgttcttaactgaaagtataggagctaagtatgaagtatattatgctccagtagtaaatggtatacctcaagaaaacaatatgaaaaaattaaaagaaggtactgcccaatattcaggatacataacagttccaattgattcttttgatataccagaaggaaagggtgcaattgtagtcagcatagaggggaaaaatggagagtcaactataggttctgagtcaaatgtaccaggatatgatacatttaaagcaaaagctaatttaggtgaaagttatatcatagataatactggaaaattctttgatataaatagagatagtaacttctatccatgtaattttactataaaagctgttacagaaaagtcttctggtgagagtatcccaaatgagtctttaattggtagtgatagatatgaaactgctatcaaagttagtcaaaatggtttcaattcttcagaaaatgtagttttagtaaatggcagttcaatagtagatgcattggcagcaactccttttacatctgctataaattcaccaatattattgacacaaaaagaagctttaaattcaaaaactaaagctgagatacagagattaggtgctaagaaagtatacctaataggtggagaaaattctataagtaaagaaattgaacaacaattaaaaagcttaaatatatcgatagagagaatatcaggaagtgatagatacaagacaagtttattattagctcaaaagttaaatggtataaaaaatgtatctcaaatagcagttgtaaatggagtgaaaggattagctgatgcaattagtgtaggcgctgcagcagcagaaaataacataccaatcatacttgcaaatgaaaagagcgaattgcaaggagctgatgaatttctaaattcattaaatatagagaaatcttatattattggaggaacagcatccctatcaaacaatctagaaagtaagttaaaaaatccaactagattatctggtagtagtagagacgaaactaattcaaagataatagataatttttataaaaaagatactttaaaaaatgcatttgtagttaaaaatggaatcaagaatcaaaatgatttaatagatggattggcagttggtcctttaggagcaaaaactgggtcaccagtaattttagttggtgataaattagctgatagccaaaaagaagttcttaaaaataagactttagaaaaagtaactcaagttggtggaggagcaaataaaaatgcatttaaagagttagtaaaattaaaaagtgctaaa

SEQ ID NO: 324 - protein, 765 aa, Clostridium difficile
DNSNTLNQIKKAEYSETYKQYLNDAKNGRTEKYNGIIPNPYQLEGTQIQSKGRTAPTSYDPRKLGLMTSIKNQEDLGICWDFAAMATLESFLKLNNYGDYDLSEEHLRWWASDGEYGWSVDDMNGALNYEAMGYLTSWSGPKLEKDIPYNGRVSKAQGAKKPTNMNTAPTVFNVTDAVCVSNDINSTKNAILQYGAVTSGYYEDIKYQSDDQNSYYCPTKSFNTNHAISIVGWDDNYSKDNFNANIRPSKNGAWLIKNSWGDYNSEGGYFWISYEDKTLMSDIDNFSIKGGKKPNDDEKMYQHDYASIVPLISKKITAANVFDFNRGDETLKSVMFLTESIGAKYEVYYAPVVNGIPQENNMKKLKEGTAQYSGYITVPIDSFDIPEGKGAIVVSIEGKNGESTIGSESNVPGYDTFKAKANLGESYIIDNTGKFFDINRDSNFYPCNFTIKAVTEKSSGESIPNESLIGSDRYETAIKVSQNGFNSSENVVLVNGSSIVDALAATPFTSAINSPILLTQKEALNSKTKAEIQRLGAKKVYLIGGENSISKEIEQQLKSLNISIERISGSDRYKTSLLLAQKLNGIKNVSQIAVVNGVKGLADAISVGAAAAENNIPIILANEKSELQGADEFLNSLNIEKSYIIGGTASLSNNLESKLKNPTRLSGSSRDETNSKIIDNFYKKDTLKNAFVVKNGIKNQNDLIDGLAVGPLGAKTGSPVILVGDKLADSQKEVLKNKTLEKVTQVGGGANKNAFKELVKLKSAK

SEQ ID NO: 325 - DNA, 1791 bp, Clostridium difficile; identical to SEQ ID NO: 194

SEQ ID NO: 326 - protein, 597 aa, Clostridium difficile; identical to SEQ ID NO: 195

SEQ ID NO: 327 - DNA, 1281 bp, Clostridium difficile
ggtagtaagattgtatttgcacaaggagggttgtttacgacacttgtaaatccgatagaagccgttgctcaaataaaagtagaagtagaagttaatgttaagtatatttttgaagatgaaaaagtctttaaggaggaaaagattaaggctgaaaaggggcggcttcttgacagtggagatcttccaataattcctgatgatatgaaatttatagatgactttctattttatgaagtaaagggagacgggaaagatgaaattatccgtaaagttacaaagattgatgttaaggataaggaaacgcaaacagaaaatgaaagctcaaaatctgagcaaagctctcaatcaaatgcttcaaagatagaaaataagggaactcaaacagagcttagcaaagatgatatttctaaaatggaaaaggagtctaaggaacttaaagaaaaacttgataagctaaatcaggagattaaggacaaggataaactaagcgagaagcaaaaggataaaatcaaagaccttgaggagaaaatagataaactgaaggaaaaacttgaaaagggcaaagatgataaggacttatcagcagatatgaaaaaggagatagacaagctaactgataagattaaggaacttgagaaaaaggctaatgaggtcggtagagctcctgttatgcataatcctactgtaacaccaattagccctatttccggaattaaacaaggaacaggaaatgtatcaccacaaacatctataaatagcagtggtaaaggttctgccacgcaggaaagtaaaggggcaaatacaaaagatacaaacagcaatgaatcaaaggagaaagaaaagcaagtttgttatccaaataagctgacaccaaaacagcctgctaataatggtagtcatgattcttctctggatggttcaagtaagaatataaataccaacaaaggagttgcttcagaaccttcaaaggcacgaggaacagttactgaaaataaggataatgcaaacaaaaattatcctattcaccataatgacagtaaagataataaagaaacggataaatattctgctgatgcaagacagtttgttacctttacaactaaaaatggtaagacctttcatttaatcattaaccatgatgaggatagcgagaaggttatgctcctaactgaagtatctgaagatgatctcttaaatatggtagaaaagaaagcaccggagaaagagattgttaaagaagaatcacaaaaagaagagcctaaacaagtgaaaaaagaagaa

SEQ ID NO: 328 - protein, 427 aa, Clostridium difficile
GSKIVFAQGGLFTTLVNPIEAVAQIKVEVEVNVKYIFEDEKVFKEEKIKAEKGRLLDSGDLPIIPDDMKFIDDFLFYEVKGDGKDEIIRKVTKIDVKDKETQTENESSKSEQSSQSNASKIENKGTQTELSKDDISKMEKESKELKEKLDKLNQEIKDKDKLSEKQKDKIKDLEEKIDKLKEKLEKGKDDKDLSADMKKEIDKLTDKIKELEKKANEVGRAPVMHNPTVTPISPISGIKQGTGNVSPQTSINSSGKGSATQESKGANTKDTNSNESKEKEKQVCYPNKLTPKQPANNGSHDSSLDGSSKNINTNKGVASEPSKARGTVTENKDNANKNYPIHHNDSKDNKETDKYSADARQFVTFTTKNGKTFHLIINHDEDSEKVMLLTEVSEDDLLNMVEKKAPEKEIVKEESQKEEPKQVKKEE

SEQ ID NO: 329 - DNA, 795 bp, Clostridium difficile
gcacctgtgtttgcagcagaagatatgtcgaaagttgagactggtgatcaaggatatacagtagtacagagcaagtataagaaagcagttgaacaattacaaaaagggttattagatggaagtataacagagattaaaattttctttgagggaactttagcatctactataaaagtaggagctgagcttagtgcagaagatgcaagtaaattattgtttacacaagtagataataaattagacaatttaggtgatggggattatgtagatttcttaataagctctccagcagagggagataaagtaactacaagtaaacttgttgcattaaaaaatttaacaggtggaactagtgcaataaaagtagctacaagtagtattattggtgaagtcgaaaatgctggtactccgggagcaaaaaatacagctccaagtagtgctgcagttatgtctatgtcagatgtatttgatacagcttttacagattcaactgaaactgctgtgaaacttactataaaagatgctatgaaaactaaaaagtttggtttagttgatggaactacttattcaacaggtcttcaatttgcagatggaaaaacagaaaaaattgttaaattaggagatagtgatactataaatttagccaaagaattaataataacacctgcaagtgcaaatgatcaagctgcgactattgagtttgctaaaccaacaacacaatctggaagcccagtaataactaaacttagaatattgaatgcaaaagaagagacaatagatattgatgctagttct

SEQ ID NO: 330 - protein, 265 aa, Clostridium difficile
APVFAAEDMSKVETGDQGYTVVQSKYKKAVEQLQKGLLDGSITEIKIFFEGTLASTIKVGAELSAEDASKLLFTQVDNKLDNLGDGDYVDFLISSPAEGDKVTTSKLVALKNLTGGTSAIKVATSSIIGEVENAGTPGAKNTAPSSAAVMSMSDVFDTAFTDSTETAVKLTIKDAMKTKKFGLVDGTTYSTGLQFADGKTEKIVKLGDSDTINLAKELIITPASANDQAATIEFAKPTTQSGSPVITKLRILNAKEETIDIDASS

SEQ ID NO: 331 - protein, 135 aa, Clostridium difficile
DKTNTELNLGEYKEVKYKVAKIKDGVAIKIREEGQVQNIAYSGDEFTVLGTQGEWVKVKVEDGEGWLATRYVDISEGVGYTNADKVNLRKDKSESSEVIEELEKGSSLLVLEDNGDWLKVKDGETEGYVKSSYIS

SEQ ID NO: 332 - DNA, 22 bp, Artificial Sequence
  Primer
gatgaagtaaatgattcatctc

SEQ ID NO: 333 - DNA, 26 bp, Artificial Sequence
  Primer
taatattctttttgctgtaacaaatc

SEQ ID NO: 334 - DNA, 25 bp, Artificial Sequence
  Primer
acaatatcaaattttagcttatctt

SEQ ID NO: 335 - DNA, 29 bp, Artificial Sequence
  Primer
tttactaatattggatatggatttaaatc

SEQ ID NO: 336 - DNA, 25 bp, Artificial Sequence
  Primer
gacactattagtaaaaatcaaaatg

SEQ ID NO: 337 - DNA, 20 bp, Artificial Sequence
  Primer
ctgtaaggctaatgcttctg

SEQ ID NO: 338 - DNA, 25 bp, Artificial Sequence
  Primer
gataatacaaaagataattccgaaa

SEQ ID NO: 339 - DNA, 25 bp, Artificial Sequence
  Primer
atttacttcatcttgatatgtaacc

SEQ ID NO: 340 - DNA, 19 bp, Artificial Sequence
  Primer
aatgcaagtgcacttacag

SEQ ID NO: 341 - DNA, 26 bp, Artificial Sequence
  Primer
cttaaatgagttttcatttccatttc

SEQ ID NO: 342 - DNA, 20 bp, Artificial Sequence
  Primer
aatgtacctaatgtagatgc

SEQ ID NO: 343 - DNA, 20 bp, Artificial Sequence
  Primer
ttttgttgcctcaatttctc

SEQ ID NO: 344 - DNA, 22 bp, Artificial Sequence
  Primer
ataccatcatatgcacttacag

SEQ ID NO: 345 - DNA, 24 bp, Artificial Sequence
  Primer
gctaagaaatttctttagaaatcc

SEQ ID NO: 346 - DNA, 28 bp, Artificial Sequence
  Primer
gatagtactactatacaacaaaataaag

SEQ ID NO: 347 - DNA, 23 bp, Artificial Sequence
  Primer
tttagctaaattttgcaaaaagc

SEQ ID NO: 348 - DNA, 24 bp, Artificial Sequence
  Primer
gacaatagcaatacattgaatcag

SEQ ID NO: 349 - DNA, 25 bp, Artificial Sequence
  Primer
tttagcactttttaattttactaac

SEQ ID NO: 350 - DNA, 20 bp, Artificial Sequence
  Primer
gctccagttttacaaggaac

SEQ ID NO: 351 - protein, 6 aa, Artificial Sequence
  Linker
GSGGGG

SEQ ID NO: 352 - protein, 8 aa, Artificial Sequence
  Linker
GSGSGGGG

SEQ ID NO: 353 - protein, 6 aa, Artificial Sequence
  Linker
ASGGGS

SEQ ID NO: 354 - protein, 26 aa, Artificial Sequence
  Immunostimulatory oligonucleotide
ICICICICICICICICICICICICIC

SEQ ID NO: 355 - protein, 11 aa, Artificial Sequence
  Polycationic polymer
KLKLLLLLKLK

SEQ ID NO: 356 - DNA, 933 bp, Artificial Sequence
  Mutated sequence
tcaccaggaaaagataaccctaaaaataaggagctatcagttgtcaaacaagtaaaagtagctgttccagatggactaccagcagtggcaatagctaaacttgcaaatgaaaatccagagattaaagaaggatatgaaacagtgtatagcattgaaaagacacctgaggcgatttccactagagtgatgaaaaaagatgcagatatagctatagttccttcaaacatggctgcaatagcgtataataaaacttcatcatataatattgttggaactgtaggaatgggttcactttatttggtgtcaacagaaaatataaaagattactctgatttagttggtaaagaagttggatgtactggaaaaggacttactccagacataactataaaaagtcttttgttacaaaaggatataaattattcagatataaaatttaattatgtaagttcagcaagtgaactggtaccattattggctactggtaaagttaaaacaggtattgttccagaacctgcacttagtgctttgatgtctaaaaatccagacataaaaattataaaaagtttaaatgactcatggaaggaagtaagtggttcaaaagacggttatcctcaatctactttaattgtaaagtctgaatttttaagagataataaagattttgttgattcttttgtaggtcaattatcaaatagtatagattgggcaaacaaaaatcctgaagaattaggtgcatattctgaaaaaataaaaatatctactgaatcaaagataataggaaaatctcttgaaagagctaatttgaaatatattccagttaaggacatgattaaagattataaaaattactatgagaaattagctaattttgatgataagacattaggaggcaaagtaccagatgaagcaatatactttgttgagaaataa

SEQ ID NO: 357 - protein, 310 aa, Artificial Sequence
  Mutated sequence
SPGKDNPKNKELSVVKQVKVAVPDGLPAVAIAKLANENPEIKEGYETVYSIEKTPEAISTRVMKKDADIAIVPSNMAAIAYNKTSSYNIVGTVGMGSLYLVSTENIKDYSDLVGKEVGCTGKGLTPDITIKSLLLQKDINYSDIKFNYVSSASELVPLLATGKVKTGIVPEPALSALMSKNPDIKIIKSLNDSWKEVSGSKDGYPQSTLIVKSEFLRDNKDFVDSFVGQLSNSIDWANKNPEELGAYSEKIKISTESKIIGKSLERANLKYIPVKDMIKDYKNYYEKLANFDDKTLGGKVPDEAIYFVEK

SEQ ID NO: 358 - DNA, 1203 bp, Artificial Sequence
  Mutated sequence
tcaaaaaaagaagattctaaaggcaaagagggtaaagaaaaattagttgtatggtctgcaccattaacagaccatgatgcagatgcatggaagccgatatttgaaaaatttgaaaaagaaaataactgtgaaattgaatttcagatagtaccatgggataactacgcagaaaaatatgcaacagcaataagtgcaggtgaaggtccagatataggatacatgtatgcagagatgtttcctcaatttatagaaatgggtgcggtagaagatttaacaccttatttagaaaaatcaggaacttcagataattatctatacttagatgatgcaaaaatgatgggtggtatttatggtttacctatagaagctgctaatccaggcgtattgtactacaataaagatatactagaaaaattaggagaaaaacctccaaaaacatgggatgattttaaaagaatctgtgaaaaagcaacaaaagatactgatggagatggaaaaatcgaccagtggggtcttgcacaaggttggggttctaaagtatttggaagcttaaactggaactggtatccgtatttatggcaagctggtggagatatatataatgatgatttaaaatcagttaaatttaataatgcagaaggcttgaaagctgcaaactttataaatgatatgaaaaagtatattccagaagatgctttatcaaaagatagtaatgaaatgattgaaagtgtatttggaccaggaaaagctgcatttactataatgctatcctctgctgctacaagtacttttgataaatcattcccggatttaaactggggatatgtaacatcattagaagataagacagttggaagttttgcttcagtagatgatttaacattaatgtcagcatgtaaaaataaagaacttggatttaaacttcttgagtatatgctaagcaaagaatcaatggaagctttccacaaagaaatacctagagctccagttgctaaaggtgaaaaataccaaggagacccaagatttgaagaaatggtgacaagagataaacatatgtatagaccattgacagttggacctcatggagtagagatatatgaatatttatggaaacaacttcaaatgatgatagctggagacataactccagaacaagcactaaatgaatctgcaaaatatgcaaatggattactagcacaataa

SEQ ID NO: 359 - protein, 400 aa, Artificial Sequence
  Mutated sequence
SKKEDSKGKEGKEKLVVWSAPLTDHDADAWKPIFEKFEKENNCEIEFQIVPWDNYAEKYATAISAGEGPDIGYMYAEMFPQFIEMGAVEDLTPYLEKSGTSDNYLYLDDAKMMGGIYGLPIEAANPGVLYYNKDILEKLGEKPPKTWDDFKRICEKATKDTDGDGKIDQWGLAQGWGSKVFGSLNWNWYPYLWQAGGDIYNDDLKSVKFNNAEGLKAANFINDMKKYIPEDALSKDSNEMIESVFGPGKAAFTIMLSSAATSTFDKSFPDLNWGYVTSLEDKTVGSFASVDDLTLMSACKNKELGFKLLEYMLSKESMEAFHKEIPRAPVAKGEKYQGDPRFEEMVTRDKHMYRPLTVGPHGVEIYEYLWKQLQMMIAGDITPEQALNESAKYANGLLAQ

SEQ ID NO: 360 - DNA, 510 bp, Artificial Sequence
  Mutated sequence
actaatgctcaaaatggaagtgattcatctaaaaaagaaactaagagcaatacaaatgttgagcaaccaaaagaagaaaacaatactgaaaaagaggttcctaataacaaagctaaacctactccaaaagaagaaactaaagctcaatcagctactatttactcttttgatgtagataagacagatttaattgaaaataaagttgatttaaataaaattgatgagaacactttatttgaagaacttcaaaaacttaaagttgttccagaatctgcaaaattaaattcatttactacaaaagacattgatggtgtaaaaactggtatattagatgttagctctgactttacaaagtcaaacttaggtagtgatgcagaaactttaatgcttgattcagttgctcgtacttacataaaaaatatgaatgttgaacaaataaaaattactgttgatggttctaattacgaaagtggtcatatagttcttgaagaaggagattacttaaagtaa

SEQ ID NO: 361 - protein, 169 aa, Artificial Sequence
  Mutated sequence
TNAQNGSDSSKKETKSNTNVEQPKEENNTEKEVPNNKAKPTPKEETKAQSATIYSFDVDKTDLIENKVDLNKIDENTLFEELQKLKVVPESAKLNSFTTKDIDGVKTGILDVSSDFTKSNLGSDAETLMLDSVARTYIKNMNVEQIKITVDGSNYESGHIVLEEGDYLK

SEQ ID NO: 362 - DNA, 22 bp, Artificial Sequence
  Primer
tcaagtataagtccagtaagag

SEQ ID NO: 363 - DNA, 19 bp, Artificial Sequence
  Primer
attaccttgtgcttgtgag

SEQ ID NO: 364 - DNA, 23 bp, Artificial Sequence
  Primer
agagttaatacaaatgtaagtgc

SEQ ID NO: 365 - DNA, 24 bp, Artificial Sequence
  Primer
tcctaataattgtaaaactccttg

SEQ ID NO: 366 - DNA, 20 bp, Artificial Sequence
  Primer
tgttcaatggaaggaccaag

SEQ ID NO: 367 - DNA, 25 bp, Artificial Sequence
  Primer
attcttaaagtcttttatattttcc

SEQ ID NO: 368 - DNA, 22 bp, Artificial Sequence
  Primer
ccagcattgtttagaaatatag

SEQ ID NO: 369 - DNA, 19 bp, Artificial Sequence
  Primer
atttaaaggaccccatccc

SEQ ID NO: 370 - DNA, 25 bp, Artificial Sequence
  Primer
ctagataagattgaaaatattcaag

SEQ ID NO: 371 - DNA, 20 bp, Artificial Sequence
  Primer
cttctttacagcatccaaac

SEQ ID NO: 372 - DNA, 21 bp, Artificial Sequence
  Primer
tgttcaccaggaaaagataac

SEQ ID NO: 373 - DNA, 21 bp, Artificial Sequence
  Primer
tttctcaacaaagtatattgc

SEQ ID NO: 374 - DNA, 20 bp, Artificial Sequence
  Primer
cttgaaaagggaacagtaac

SEQ ID NO: 375 - DNA, 21 bp, Artificial Sequence
  Primer
aacaaatcttcttgcaccaag

SEQ ID NO: 376 - DNA, 24 bp, Artificial Sequence
  Primer
tgttcatcaggaaataataaaaat

SEQ ID NO: 377 - DNA, 20 bp, Artificial Sequence
  Primer
ctcattaataggctccttag

SEQ ID NO: 378 - DNA, 25 bp, Artificial Sequence
  Primer
tgtagtagtaaaccaaaagaaaaag

SEQ ID NO: 379 - DNA, 21 bp, Artificial Sequence
  Primer
taatacctttgctttccagtc

SEQ ID NO: 380 - DNA, 25 bp, Artificial Sequence
  Primer
tgttcaaaaaaagaagattctaaag

SEQ ID NO: 381 - DNA, 21 bp, Artificial Sequence
  Primer
ttgtgctagtaatccatttgc

SEQ ID NO: 382 - DNA, 22 bp, Artificial Sequence
  Primer
aatcccaaaagagagttgatag

SEQ ID NO: 383 - DNA, 23 bp, Artificial Sequence
  Primer
gctcttaaatagactataatcac

SEQ ID NO: 384 - DNA, 27 bp, Artificial Sequence
  Primer
actgaatctaatgctatggaaaataac

SEQ ID NO: 385 - DNA, 26 bp, Artificial Sequence
  Primer
ttttaatgaatcttctatgcctttac

SEQ ID NO: 386 - DNA, 26 bp, Artificial Sequence
  Primer
tgtagtaatactaaaacaaaacaaag

SEQ ID NO: 387 - DNA, 24 bp, Artificial Sequence
  Primer
atttgattcattcgattttatatc

SEQ ID NO: 388 - DNA, 25 bp, Artificial Sequence
  Primer
cttgaaacaatttatactattcaag

SEQ ID NO: 389 - DNA, 24 bp, Artificial Sequence
  Primer
tttatattcaaaaaaatcttctcc

SEQ ID NO: 390 - DNA, 25 bp, Artificial Sequence
  Primer
tcaaatactttcgcagatactatag

SEQ ID NO: 391 - DNA, 27 bp, Artificial Sequence
  Primer
tgtcatatctaactttaacttcttttc

SEQ ID NO: 392 - DNA, 23 bp, Artificial Sequence
  Primer
gacaatactacaaagcaagaaag

SEQ ID NO: 393 - DNA, 29 bp, Artificial Sequence
  Primer
atcatctatttcaaattctaatattttac

SEQ ID NO: 394 - DNA, 25 bp, Artificial Sequence
  Primer
tttacaccaatagtatcttatgctg

SEQ ID NO: 395 - DNA, 23 bp, Artificial Sequence
  Primer
ttttactattgtatcatctcttg

SEQ ID NO: 396 - DNA, 23 bp, Artificial Sequence
  Primer
cattcaggaagaactgattcatc

SEQ ID NO: 397 - DNA, 24 bp, Artificial Sequence
  Primer
ataagtagcatttctacttttctc

SEQ ID NO: 398 - DNA, 25 bp, Artificial Sequence
  Primer
tatagtacatctagcaacaaaagtg

SEQ ID NO: 399 - DNA, 25 bp, Artificial Sequence
  Primer
tttgaagtatgttgttgttttactc

SEQ ID NO: 400 - DNA, 23 bp, Artificial Sequence
  Primer
tacaaagtaaatgctgatgagac

SEQ ID NO: 401 - DNA, 28 bp, Artificial Sequence
  Primer
tttagttgtcttatttatactcatattc

SEQ ID NO: 402 - DNA, 23 bp, Artificial Sequence
  Primer
caaactgtggcaacaaatttaac

SEQ ID NO: 403 - DNA, 23 bp, Artificial Sequence
  Primer
gttagaacttggactatttccac

SEQ ID NO: 404 - DNA, 25 bp, Artificial Sequence
  Primer
aaggtaggtcaaataaaatttagtg

SEQ ID NO: 405 - DNA, 29 bp, Artificial Sequence
  Primer
ttttaatatattaaataaacttgatagcc

SEQ ID NO: 406 - DNA, 33 bp, Artificial Sequence; identical to SEQ ID NO: 217
  Primer

SEQ ID NO: 407 - DNA, 21 bp, Artificial Sequence
  Primer
atcctctgtttctaagtcttg

SEQ ID NO: 408 - DNA, 27 bp, Artificial Sequence
  Primer
ggatatagaagtattaataagtcattt

SEQ ID NO: 409 - DNA, 23 bp, Artificial Sequence
  Primer
tcttaaaacatcaaacattcctc

SEQ ID NO: 410 - DNA, 19 bp, Artificial Sequence
  Primer
ttaccgagtacacccgttc

SEQ ID NO: 411 - DNA, 24 bp, Artificial Sequence
  Primer
attgtagatagaatgggcttcatc

SEQ ID NO: 412 - DNA, 21 bp, Artificial Sequence
  Primer
gatgaagcccattctatctac

SEQ ID NO: 413 - DNA, 17 bp, Artificial Sequence
  Primer
gtcgctaggtctgctag

SEQ ID NO: 414 - DNA, 24 bp, Artificial Sequence
  Primer
tcagaattaggagagaatagtcag

SEQ ID NO: 415 - DNA, 24 bp, Artificial Sequence
  Primer
tttatcatcatttattgaaatctg

SEQ ID NO: 416 - DNA, 26 bp, Artificial Sequence
  Primer
tcaccaataagtaatgttgttataac

SEQ ID NO: 417 - DNA, 20 bp, Artificial Sequence
  Primer
tactggtggatttaccaaag

SEQ ID NO: 418 - DNA, 41 bp, Artificial Sequence
  Primer
ctgtacttccagggcatgtcaagtataagtccagtaagagt

SEQ ID NO: 419 - DNA, 36 bp, Artificial Sequence
  Primer
aattaagtcgcgttaatccatcaatgcattataatc

SEQ ID NO: 420 - DNA, 38 bp, Artificial Sequence
  Primer
ctgtacttccagggcgataaggtttatggattagttac

SEQ ID NO: 421 - DNA, 39 bp, Artificial Sequence
  Primer
aattaagtcgcgttaattaccttgtgcttgtgagaaata

SEQ ID NO: 422 - DNA, 24 bp, Artificial Sequence
  Primer
tcagaattaggagagaatagtcag

SEQ ID NO: 423 - DNA, 20 bp, Artificial Sequence
  Primer
tactggtggatttaccaaag

SEQ ID NO: 424 - DNA, 23 bp, Artificial Sequence
  Primer
tgtactaatgctcaaaatggaag

SEQ ID NO: 425 - DNA, 24 bp, Artificial Sequence
  Primer
ctttaagtaatctccttcttcaag

SEQ ID NO: 426 - DNA, 801 bp, Artificial Sequence
  Clostridium difficile
tcagatacaattaaaggtaacaatatatatgagacggctggattaatagcagataaaaagagttatgatacagcaattatggtaaatatggataattctatagcagatggtctttcagcaagtggtcttgcaggtgctgttgatgctccaattttgcttgcacaaaaaaataagataccaaatgaaacaaaacaaagattaaaaaatgttaaaaagatatacataataggtaaagaattatcaataagtaagtcagtagaaactgaactaaaaaacacaggggcacaggtaactagattaggtggagatgacagaataaagactagttatagtgttgctaaagaggtaaatggtatcaaaaaagttgatgaagtgatattaactaatgcatataaaggagaagcagatacaataagtgctgcacctgtatcagtaagagatatagctcctatagtacttacagatggaaagagtgtgcctttttcaacaagcaatgtaaaaacatatgcagtaggtgggagtatatcaatgagcactagtttagttaataaaactaatgctaaaagacttggtggttcagatagatatgatacaaataagaaagttataaaagagttttatccagatgcatcagaattttatttgagtgatggatatgatttagtaaatgcacttacaggttctacaattgctaaggaaaatccaattgtattggtgtcagaaagtagtgataagtctatattagcaggagcagataagattactagattaggttcaataagtgacagtgtgtataataag

SEQ ID NO: 427 - protein, 267 aa, Artificial Sequence
  Clostridium difficile
SDTIKGNNIYETAGLIADKKSYDTAIMVNMDNSIADGLSASGLAGAVDAPILLAQKNKIPNETKQRLKNVKKIYIIGKELSISKSVETELKNTGAQVTRLGGDDRIKTSYSVAKEVNGIKKVDEVILTNAYKGEADTISAAPVSVRDIAPIVLTDGKSVPFSTSNVKTYAVGGSISMSTSLVNKTNAKRLGGSDRYDTNKKVIKEFYPDASEFYLSDGYDLVNALTGSTIAKENPIVLVSESSDKSILAGADKITRLGSISDSVYNK

SEQ ID NO: 428 - DNA, 402 bp, Artificial Sequence
  Clostridium difficile
ttaataccaatattatatgatactgctgttcaggaaggtgttaatcctgttttggcagtagctcaatctgcaaaagaaactggtttttgtaattttggtggagtattagatgcatcatttaagaatccttgtggacttaaaacttctgtaggtggttctgatactgataagaatgcccattcaagatttgatacttgggaagaaggaatattagctcaaattcaacatttatgcttatatgcaggacaagatggttacccactttcaaatccagtagaccctagacatgaaaaatctttatttggtaaggctaaaacagttgaaagtttatctaataattgggctggaggtcaatatggacaagatttagtaagaatgatgggagaaattgaggcaacaaaa

SEQ ID NO: 429 - protein, 134 aa, Artificial Sequence
  Clostridium difficile
LIPILYDTAVQEGVNPVLAVAQSAKETGFCNFGGVLDASFKNPCGLKTSVGGSDTDKNAHSRFDTWEEGILAQIQHLCLYAGQDGYPLSNPVDPRHEKSLFGKAKTVESLSNNWAGGQYGQDLVRMMGEIEATK

SEQ ID NO: 430 - DNA, 834 bp, Artificial Sequence
  Clostridium difficile
atgtcaagtataagtccagtaagagttacaggcctttcaggaaattttgatatggaaggtataatagaagctagtatgataagagataaggaaaaagttaataaagcgaaacaagatcaacaaatagttaaatggaaacaagaaatatacagggatattataaaagagtcaaagaatctttatgacaagtatttaaatggagactctcctaatagtataacaaataaaaaagcatattctgctacaagaataactagttctgatgaaagtattatagtagcaaaaggctcagctggtgcagaaaaaataaattatcaatttgcagtttctcaaatggctgaaccagcaaaagtaactattaagttaaattcaagtgaccctattgttcaacagtttcctccaaatgctagtggagcaagttctttaaatataggtggtgtaaatataccaatatctgaacaagatactacaagtactattgtaagtaagataaactccctttgtgcagataatgatataagagcttcttatagtgagatgacaggtgaattgattatctcaagaaaacagactggttcatcatcagatattgatttaaaagtaattggaaatgatagtttagctggacaaattgccagtgataatggtattacatttacaactgatgctagtggaactaaatctgcagtagtatatggaaaaaatttagaagctgatgtaactgatgaccaaggaagagtaacacacataagtaaagaacagaattcatttaaaatagataacattgattataatgtaaattcaaaaggaagtgctaaactggtttctgttact

SEQ ID NO: 431 - protein, 248 aa, Artificial Sequence
  Clostridium difficile
EKVNKAKQDQQIVKWKQEIYRDIIKESKNLYDKYLNGDSPNSITNKKAYSATRITSSDESIIVAKGSAGAEKINYQFAVSQMAEPAKVTIKLNSSDPIVQQFPPNASGASSLNIGGVNIPISEQDTTSTIVSKINSLCADNDIRASYSEMTGELIISRKQTGSSSDIDLKVIGNDSLAGQIASDNGITFTTDASGTKSAVVYGKNLEADVTDDQGRVTHISKEQNSFKIDNIDYNVNSKGSAKLVSVT

SEQ ID NO: 432 - DNA, 2721 bp, Artificial Sequence
  Clostridium difficile
tcagaattaggagagaatagtcagattcaaagtggttcaactaattcatcaactggagaggagaaggaaagcgacaataaaaagccagaacagactccagagaaagataaggcaacagataataaaaaaccagaacagaccccagaggaagaaaaaccaacagataataaaaaaccagaacagaccccagaagaagataagtcaacagataataaaaagccagagcaaactccagaaggagaaaagccaatagataataaaaagccagagcagataccagaagaagataagtcaacagataataaaaagtcagaacaagctttagaagatgaaaaaccactagacaataaaaatacagaaaaaactccagaggaagataatctattagaagatgaaaatttattgaaagttttagaagaagaacttaatgaagaaaatgaagactatggatttgttgtaaaaattaataacaatacaatagaaacggaatcaatgaaaaaaatatcatttaatttaacttatactccaacatcaaaaggaatacaagcaggagattcaataacttttaaggtgccagatgtattcaataaagttaatttagattatacaagtgaatgctttgataaaacagaaagtaatggagagtatacacttacatttagagaattacctaatggccaaagtgtaatgcaaggtaaaataggtttggaagcatatgttaaaaaggttgatgaagatactaatgcaaaaatacatattgaaactactggaaaaatagaaagtggaagtggagatatagatgtagaaataaaacctggagataaaacggatgttccagatgctaaaggaacacttaaaaagcttgttgaaggaaaaaaatcaactactgtatttatgccagttaaaaataaagatataaattacagtatacaagtaaatgaaaagcaggaagagttaaaagatattattttgtatgatgagcttcctgaaggattgacattgataaatggttctgtaagtgtagtaacaagtgatggaaaagaagttagtgattttaatattgaacagagtaaaaattctatttcagttaattttggaaatatagataaatcgtatactgttaagtataaggctagaatcagtgacaaaaatgcaaaacatggtaataaatataagaatgtagctaggattgaatctgatggtaagaagatacaagaagatgatgctactgtaagtatatttgatagaggagatgattatcttcttactaaaggacattcaggagcaacaaatattactcaagttggtcaagtaataaactatcagatttcaataaatgatgataaatcaccaataagtaatgttgttataacagataatataccagaaggcatgagattaactacttcaggagaagctgggcatgattttagagttgtagaaattccaatgaatgggagctggactccttggagtaaagaaaaaattgccaataatatttcatataaagtagaagaaaaaagaaatgaaagtgggcaagtagataaagttataactggatttacaattaatctcagtaaagaagaagtggaatcaaagttttttatagcttatacattaaaggtaattagtattgaagatagctatataaatagagctgttcttgatgcaaataatagtgaaattgataaaaatgatgagataaactttaagaaaaattctggattaataagcgcaaaaaaagaagttgataaaaaagttttaaacagtagtgataaccagattgttaaatacaaaatcaatatgtcaacttatggagtttatgatgcaggacaagtaaatcttttagatgaagtaaactcagttctagaaatatctaatataaaatattctgataatcttgaacttaaaaaagaagctggagatggaaaaaatacaataagattagtaaataaatacgaatttaaacagataaaagaaggggaacctgtgcaaagttgggttacatttgatgcaaacttcacaaatgtaaaagttggggagactatacgaaatgtggctcagattaatggttcaagtcctccaggagtagagactactaagcaaggttatgcttttgaagctaaaaaagtggatgctttagataaaaatgtactttcaggtgctaagttcaatttagaagatgcatttggaaatatagtagttaaggatttagtcagtgatgaagatggtataattcaatctagtgtaaaaaacccaggaacatattatttagtggagataatggctccacgtggatatgaaaaactgaaggataaaattaaggttgaaattggtaataaagatattggtagaatagtggatattggaaatatagaaaacataagacaagaaaatccaccagtaaatccaccagcaccaccaaatacagatgaaccaatagtaaatccaccagtaccaccaagcacagataaaccaaggaaaccatcaagttcatctgatacagaggatactatagttataaatccaccagtaccaccatcagaagatataataaatccgccaataccagaggtattgaatcctccagtaccaccatcagaagagatgatagaaactcctgttaaacagattattccaataccagaagtagtaaagccatcagtgtcagaagaaaaaaataataaagttaaagatgatactttggtaaatccaccagta

SEQ ID NO: 433 - protein, 907 aa, Artificial Sequence
  Clostridium difficile
SELGENSQIQSGSTNSSTGEEKESDNKKPEQTPEKDKATDNKKPEQTPEEEKPTDNKKPEQTPEEDKSTDNKKPEQTPEGEKPIDNKKPEQIPEEDKSTDNKKSEQALEDEKPLDNKNTEKTPEEDNLLEDENLLKVLEEELNEENEDYGFVVKINNNTIETESMKKISFNLTYTPTSKGIQAGDSITFKVPDVFNKVNLDYTSECFDKTESNGEYTLTFRELPNGQSVMQGKIGLEAYVKKVDEDTNAKIHIETTGKIESGSGDIDVEIKPGDKTDVPDAKGTLKKLVEGKKSTTVFMPVKNKDINYSIQVNEKQEELKDIILYDELPEGLTLINGSVSVVTSDGKEVSDFNIEQSKNSISVNFGNIDKSYTVKYKARISDKNAKHGNKYKNVARIESDGKKIQEDDATVSIFDRGDDYLLTKGHSGATNITQVGQVINYQISINDDKSPISNVVITDNIPEGMRLTTSGEAGHDFRVVEIPMNGSWTPWSKEKIANNISYKVEEKRNESGQVDKVITGFTINLSKEEVESKFFIAYTLKVISIEDSYINRAVLDANNSEIDKNDEINFKKNSGLISAKKEVDKKVLNSSDNQIVKYKINMSTYGVYDAGQVNLLDEVNSVLEISNIKYSDNLELKKEAGDGKNTIRLVNKYEFKQIKEGEPVQSWVTFDANFTNVKVGETIRNVAQINGSSPPGVETTKQGYAFEAKKVDALDKNVLSGAKFNLEDAFGNIVVKDLVSDEDGIIQSSVKNPGTYYLVEIMAPRGYEKLKDKIKVEIGNKDIGRIVDIGNIENIRQENPPVNPPAPPNTDEPIVNPPVPPSTDKPRKPSSSSDTEDTIVINPPVPPSEDIINPPIPEVLNPPVPPSEEMIETPVKQIIPIPEVVKPSVSEEKNNKVKDDTLVNPPV

SEQ ID NO: 434 - DNA, 636 bp, Artificial Sequence
  Mutated sequence
atgggcagcagccatcatcatcatcatcacgaaaacctgtacttccagggcgatagtactactatacaacaaaataaagacacacttagtcaaatagtagtttttccaactggaaattacgataaaaacgaagctaatgctatggtaaatagattagctaatatagatggaaagtatttaaatgcattaaagcaaaataacttaaaaataaaattattaagtggaaagttaacagatgaaaaagaatatgcttatttaaaaggtgtagttcctaagggatgggaaggtactggaaaaacttgggatgatgttccaggtttaggtggaagtacagtagctcttagaataggatttagtaacaaaggtaaagggcatgatgcaataaatttagaattacatgaaacagcacatgcaatagaccatatagtattaaatgatatatctaaatcagcacaattcaaacaaatatttgctaaagaaggtcgttctttaggtaatgtaaactacttaggtgtatatccagaagaattttttgcagaatcatttgcatattactatttaaatcaagatacaaatagtaagttaaaatcagcttgtccacaaacttatagctttttgcaaaatttagctaaataa

SEQ ID NO: 435 - protein, 220 aa, Artificial Sequence; identical to SEQ ID NO: 300
  Mutated sequence

SEQ ID NO: 436 - DNA, 636 bp, Artificial Sequence
  Mutated sequence
atgggcagcagccatcatcatcatcatcacgaaaacctgtacttccagggcgatagtactactatacaacaaaataaagacacacttagtcaaatagtagtttttccaactggaaattacgataaaaacgaagctaatgctatggtaaatagattagctaatatagatggaaagtatttaaatgcattaaagcaaaataacttaaaaataaaattattaagtggaaagttaacagatgaaaaagaatatgcttatttaaaaggtgtagttcctaagggatgggaaggtactggaaaaacttgggatgatgttccaggtttaggtggaagtacagtagctcttagaataggatttagtaacaaaggtaaagggcatgatgcaataaatttagaattacatgcaacagcacatgcaatagaccatatagtattaaatgatatatctaaatcagcacaattcaaacaaatatttgctaaagaaggtcgttctttaggtaatgtaaactacttaggtgtatatccagaagaattttttgcagaatcatttgcatattactatttaaatcaagatacaaatagtaagttaaaatcagcttgtccacaaacttatagctttttgcaaaatttagctaaataa

SEQ ID NO: 437 - protein, 220 aa, Artificial Sequence
  Mutated sequence
MRPSKKLLIAIISIFLISSVPVSAHADSTTIQQNKDTLSQIVVFPTGNYDKNEANAMVNRLANIDGKYLNALKQNNLKIKLLSGKLTDEKEYAYLKGVVPKGWEGTGKTWDDVPGLGGSTVALRIGFSNKGKGHDAINLELHATAHAIDHIVLNDISKSAQFKQIFAKEGRSLGNVNYLGVYPEEFFAESFAYYYLNQDTNSKLKSACPQTYSFLQNLAK

SEQ ID NO: 438 - DNA, 636 bp, Artificial Sequence
  Mutated sequence
atgggcagcagccatcatcatcatcatcacgaaaacctgtacttccagggcgatagtactactatacaacaaaataaagacacacttagtcaaatagtagtttttccaactggaaattacgataaaaacgaagctaatgctatggtaaatagattagctaatatagatggaaagtatttaaatgcattaaagcaaaataacttaaaaataaaattattaagtggaaagttaacagatgaaaaagaatatgcttatttaaaaggtgtagttcctaagggatgggaaggtactggaaaaacttgggatgatgttccaggtttaggtggaagtacagtagctcttagaataggatttagtaacaaaggtaaagggcatgatgcaataaatttagaattacatgaaacagcacatgcaatagacgcaatagtattaaatgatatatctaaatcagcacaattcaaacaaatatttgctaaagaaggtcgttctttaggtaatgtaaactacttaggtgtatatccagaagaattttttgcagaatcatttgcatattactatttaaatcaagatacaaatagtaagttaaaatcagcttgtccacaaacttatagctttttgcaaaatttagctaaataa

SEQ ID NO: 439 - protein, 220 aa, Artificial Sequence
  Mutated sequence
MRPSKKLLIAIISIFLISSVPVSAHADSTTIQQNKDTLSQIVVFPTGNYDKNEANAMVNRLANIDGKYLNALKQNNLKIKLLSGKLTDEKEYAYLKGVVPKGWEGTGKTWDDVPGLGGSTVALRIGFSNKGKGHDAINLELHETAHAIDAIVLNDISKSAQFKQIFAKEGRSLGNVNYLGVYPEEFFAESFAYYYLNQDTNSKLKSACPQTYSFLQNLAK

SEQ ID NO: 440 - DNA, 636 bp, Artificial Sequence
  Mutated sequence
atgggcagcagccatcatcatcatcatcacgaaaacctgtacttccagggcgatagtactactatacaacaaaataaagacacacttagtcaaatagtagtttttccaactggaaattacgataaaaacgaagctaatgctatggtaaatagattagctaatatagatggaaagtatttaaatgcattaaagcaaaataacttaaaaataaaattattaagtggaaagttaacagatgaaaaagaatatgcttatttaaaaggtgtagttcctaagggatgggaaggtactggaaaaacttgggatgatgttccaggtttaggtggaagtacagtagctcttagaataggatttagtaacaaaggtaaagggcatgatgcaataaatttagaattacatgaaacagcacatgcaatagaccatatagtattaaatgatatatctaaatcagcacaattcaaacaaatatttgctaaagaaggtcgttctttaggtaatgtaaacttcttaggtgtatatccagaagaattttttgcagaatcatttgcatattactatttaaatcaagatacaaatagtaagttaaaatcagcttgtccacaaacttatagctttttgcaaaatttagctaaataa

SEQ ID NO: 441 - protein, 220 aa, Artificial Sequence
  Mutated sequence
MRPSKKLLIAIISIFLISSVPVSAHADSTTIQQNKDTLSQIVVFPTGNYDKNEANAMVNRLANIDGKYLNALKQNNLKIKLLSGKLTDEKEYAYLKGVVPKGWEGTGKTWDDVPGLGGSTVALRIGFSNKGKGHDAINLELHETAHAIDHIVLNDISKSAQFKQIFAKEGRSLGNVNFLGVYPEEFFAESFAYYYLNQDTNSKLKSACPQTYSFLQNLAK

SEQ ID NO: 442 - DNA, 636 bp, Artificial Sequence
  Mutated sequence
atgggcagcagccatcatcatcatcatcacgaaaacctgtacttccagggcgatagtactactatacaacaaaataaagacacacttagtcaaatagtagtttttccaactggaaattacgataaaaacgaagctaatgctatggtaaatagattagctaatatagatggaaagtatttaaatgcattaaagcaaaataacttaaaaataaaattattaagtggaaagttaacagatgaaaaagaatatgcttatttaaaaggtgtagttcctaagggatgggaaggtactggaaaaacttgggatgatgttccaggtttaggtggaagtacagtagctcttagaataggatttagtaacaaaggtaaagggcatgatgcaataaatttagaattacatgaaacagcacatgcaatagaccatatagtattaaatgatatatctaaatcagcacaattcaaacaaatatttgctaaagaaggtcgttctttaggtaatgtaaactacttaggtgtatatccagaagaattttttgcagaatcatttgcatattactatttaaatcaagatacaaatagtaagttaaaatcagcttctccacaaacttatagctttttgcaaaatttagctaaataa

SEQ ID NO: 443 - protein, 220 aa, Artificial Sequence
  Mutated sequence
MRPSKKLLIAIISIFLISSVPVSAHADSTTIQQNKDTLSQIVVFPTGNYDKNEANAMVNRLANIDGKYLNALKQNNLKIKLLSGKLTDEKEYAYLKGVVPKGWEGTGKTWDDVPGLGGSTVALRIGFSNKGKGHDAINLELHETAHAIDHIVLNDISKSAQFKQIFAKEGRSLGNVNYLGVYPEEFFAESFAYYYLNQDTNSKLKSASPQTYSFLQNLAK

SEQ ID NO: 444 - DNA, 636 bp, Artificial Sequence
  Mutated sequence
atgggcagcagccatcatcatcatcatcacgaaaacctgtacttccagggcgatagtactactatacaacaaaataaagacacacttagtcaaatagtagtttttccaactggaaattacgataaaaacgaagctaatgctatggtaaatagattagctaatatagatggaaagtatttaaatgcattaaagcaaaataacttaaaaataaaattattaagtggaaagttaacagatgaaaaagaatatgcttatttaaaaggtgtagttcctaagggatgggaaggtactggaaaaacttgggatgatgttccaggtttaggtggaagtacagtagctcttagaataggatttagtaacaaaggtaaagggcatgatgcaataaatttagaattagctgaaacagcacatgcaatagaccatatagtattaaatgatatatctaaatcagcacaattcaaacaaatatttgctaaagaaggtcgttctttaggtaatgtaaactacttaggtgtatatccagaagaattttttgcagaatcatttgcatattactatttaaatcaagatacaaatagtaagttaaaatcagcttgtccacaaacttatagctttttgcaaaatttagctaaataa

SEQ ID NO: 445 - protein, 220 aa, Artificial Sequence
  Mutated sequence
MRPSKKLLIAIISIFLISSVPVSAHADSTTIQQNKDTLSQIVVFPTGNYDKNEANAMVNRLANIDGKYLNALKQNNLKIKLLSGKLTDEKEYAYLKGVVPKGWEGTGKTWDDVPGLGGSTVALRIGFSNKGKGHDAINLELAETAHAIDHIVLNDISKSAQFKQIFAKEGRSLGNVNYLGVYPEEFFAESFAYYYLNQDTNSKLKSACPQTYSFLQNLAK

SEQ ID NO: 446 - DNA, 636 bp, Artificial Sequence
  Mutated sequence
atgggcagcagccatcatcatcatcatcacgaaaacctgtacttccagggcgatagtactactatacaacaaaataaagacacacttagtcaaatagtagtttttccaactggaaattacgataaaaacgaagctaatgctatggtaaatagattagctaatatagatggaaagtatttaaatgcattaaagcaaaataacttaaaaataaaattattaagtggaaagttaacagatgaaaaagaatatgcttatttaaaaggtgtagttcctaagggatgggaaggtactggaaaaacttgggatgatgttccaggtttaggtggaagtacagtagctcttagaataggatttagtaacaaaggtaaagggcatgatgcaataaatttagaattacatgaaacagcagctgcaatagaccatatagtattaaatgatatatctaaatcagcacaattcaaacaaatatttgctaaagaaggtcgttctttaggtaatgtaaactacttaggtgtatatccagaagaattttttgcagaatcatttgcatattactatttaaatcaagatacaaatagtaagttaaaatcagcttgtccacaaacttatagctttttgcaaaatttagctaaataa

SEQ ID NO: 447 - protein, 220 aa, Artificial Sequence
  Mutated sequence
MRPSKKLLIAIISIFLISSVPVSAHADSTTIQQNKDTLSQIVVFPTGNYDKNEANAMVNRLANIDGKYLNALKQNNLKIKLLSGKLTDEKEYAYLKGVVPKGWEGTGKTWDDVPGLGGSTVALRIGFSNKGKGHDAINLELHETAAAIDHIVLNDISKSAQFKQIFAKEGRSLGNVNYLGVYPEEFFAESFAYYYLNQDTNSKLKSACPQTYSFLQNLAK

SEQ ID NO: 448 - DNA, 636 bp, Artificial Sequence
  Mutated sequence
atgggcagcagccatcatcatcatcatcacgaaaacctgtacttccagggcgatagtactactatacaacaaaataaagacacacttagtcaaatagtagtttttccaactggaaattacgataaaaacgaagctaatgctatggtaaatagattagctaatatagatggaaagtatttaaatgcattaaagcaaaataacttaaaaataaaattattaagtggaaagttaacagatgaaaaagaatatgcttatttaaaaggtgtagttcctaagggatgggaaggtactggaaaaacttgggatgatgttccaggtttaggtggaagtacagtagctcttagaataggatttagtaacaaaggtaaagggcatgatgcaataaatttagaattagctgaaacagcagctgcaatagaccatatagtattaaatgatatatctaaatcagcacaattcaaacaaatatttgctaaagaaggtcgttctttaggtaatgtaaactacttaggtgtatatccagaagaattttttgcagaatcatttgcatattactatttaaatcaagatacaaatagtaagttaaaatcagcttgtccacaaacttatagctttttgcaaaatttagctaaataa

SEQ ID NO: 449 - protein, 220 aa, Artificial Sequence
  Mutated sequence
MRPSKKLLIAIISIFLISSVPVSAHADSTTIQQNKDTLSQIVVFPTGNYDKNEANAMVNRLANIDGKYLNALKQNNLKIKLLSGKLTDEKEYAYLKGVVPKGWEGTGKTWDDVPGLGGSTVALRIGFSNKGKGHDAINLELAETAAAIDHIVLNDISKSAQFKQIFAKEGRSLGNVNYLGVYPEEFFAESFAYYYLNQDTNSKLKSACPQTYSFLQNLAK

SEQ ID NO: 450 - DNA, 636 bp, Artificial Sequence
  Mutated sequence
atgggcagcagccatcatcatcatcatcacgaaaacctgtacttccagggcgatagtactactatacaacaaaataaagacacacttagtcaaatagtagtttttccaactggaaattacgataaaaacgaagctaatgctatggtaaatagattagctaatatagatggaaagtatttaaatgcattaaagcaaaataacttaaaaataaaattattaagtggaaagttaacagatgaaaaagaatatgcttatttaaaaggtgtagttcctaagggatgggaaggtactggaaaaacttgggatgatgttccaggtttaggtggaagtacagtagctcttagaataggatttagtaacaaaggtaaagggcatgatgcaataaatttagaattagcagcaacagcacatgcaatagaccatatagtattaaatgatatatctaaatcagcacaattcaaacaaatatttgctaaagaaggtcgttctttaggtaatgtaaactacttaggtgtatatccagaagaattttttgcagaatcatttgcatattactatttaaatcaagatacaaatagtaagttaaaatcagcttgtccacaaacttatagctttttgcaaaatttagctaaataa

SEQ ID NO: 451 - protein, 220 aa, Artificial Sequence
  Mutated sequence
MRPSKKLLIAIISIFLISSVPVSAHADSTTIQQNKDTLSQIVVFPTGNYDKNEANAMVNRLANIDGKYLNALKQNNLKIKLLSGKLTDEKEYAYLKGVVPKGWEGTGKTWDDVPGLGGSTVALRIGFSNKGKGHDAINLELAATAHAIDHIVLNDISKSAQFKQIFAKEGRSLGNVNYLGVYPEEFFAESFAYYYLNQDTNSKLKSACPQTYSFLQNLAK

SEQ ID NO: 452 - DNA, 636 bp, Artificial Sequence
  Mutated sequence
atgggcagcagccatcatcatcatcatcacgaaaacctgtacttccagggcgatagtactactatacaacaaaataaagacacacttagtcaaatagtagtttttccaactggaaattacgataaaaacgaagctaatgctatggtaaatagattagctaatatagatggaaagtatttaaatgcattaaagcaaaataacttaaaaataaaattattaagtggaaagttaacagatgaaaaagaatatgcttatttaaaaggtgtagttcctaagggatgggaaggtactggaaaaacttgggatgatgttccaggtttaggtggaagtacagtagctcttagaataggatttagtaacaaaggtaaagggcatgatgcaataaatttagaattagcacgaacagcacatgcaatagaccatatagtattaaatgatatatctaaatcagcacaattcaaacaaatatttgctaaagaaggtcgttctttaggtaatgtaaactacttaggtgtatatccagaagaattttttgcagaatcatttgcatattactatttaaatcaagatacaaatagtaagttaaaatcagcttgtccacaaacttatagctttttgcaaaatttagctaaataa

SEQ ID NO: 453 - protein, 220 aa, Artificial Sequence
  Mutated sequence
MRPSKKLLIAIISIFLISSVPVSAHADSTTIQQNKDTLSQIVVFPTGNYDKNEANAMVNRLANIDGKYLNALKQNNLKIKLLSGKLTDEKEYAYLKGVVPKGWEGTGKTWDDVPGLGGSTVALRIGFSNKGKGHDAINLELARTAHAIDHIVLNDISKSAQFKQIFAKEGRSLGNVNYLGVYPEEFFAESFAYYYLNQDTNSKLKSACPQTYSFLQNLAK

SEQ ID NO: 454 - DNA, 636 bp, Artificial Sequence
  Mutated sequence
atgggcagcagccatcatcatcatcatcacgaaaacctgtacttccagggcgatagtactactatacaacaaaataaagacacacttagtcaaatagtagtttttccaactggaaattacgataaaaacgaagctaatgctatggtaaatagattagctaatatagatggaaagtatttaaatgcattaaagcaaaataacttaaaaataaaattattaagtggaaagttaacagatgaaaaagaatatgcttatttaaaaggtgtagttcctaagggatgggaaggtactggaaaaacttgggatgatgttccaggtttaggtggaagtacagtagctcttagaataggatttagtaacaaaggtaaagggcatgatgcaataaatttagaattagcagaaacagcacatgcaatagaccatatagtattaaatgatatatctaaatcagcacaattcaaacaaatatttgctaaagaaggtcgttctttaggtaatgtaaacttcttaggtgtatatccagaagaattttttgcagaatcatttgcatattactatttaaatcaagatacaaatagtaagttaaaatcagcttgtccacaaacttatagctttttgcaaaatttagctaaataa

SEQ ID NO: 455 - protein, 220 aa, Artificial Sequence
  Mutated sequence
MRPSKKLLIAIISIFLISSVPVSAHADSTTIQQNKDTLSQIVVFPTGNYDKNEANAMVNRLANIDGKYLNALKQNNLKIKLLSGKLTDEKEYAYLKGVVPKGWEGTGKTWDDVPGLGGSTVALRIGFSNKGKGHDAINLELAETAHAIDHIVLNDISKSAQFKQIFAKEGRSLGNVNFLGVYPEEFFAESFAYYYLNQDTNSKLKSACPQTYSFLQNLAK

SEQ ID NO: 456 - DNA, 636 bp, Artificial Sequence
  Mutated sequence
atgggcagcagccatcatcatcatcatcacgaaaacctgtacttccagggcgatagtactactatacaacaaaataaagacacacttagtcaaatagtagtttttccaactggaaattacgataaaaacgaagctaatgctatggtaaatagattagctaatatagatggaaagtatttaaatgcattaaagcaaaataacttaaaaataaaattattaagtggaaagttaacagatgaaaaagaatatgcttatttaaaaggtgtagttcctaagggatgggaaggtactggaaaaacttgggatgatgttccaggtttaggtggaagtacagtagctcttagaataggatttagtaacaaaggtaaagggcatgatgcaataaatttagaattacatgcaacagcacatgcaatagaccatatagtattaaatgatatatctaaatcagcacaattcaaacaaatatttgctaaagaaggtcgttctttaggtaatgtaaacttcttaggtgtatatccagaagaattttttgcagaatcatttgcatattactatttaaatcaagatacaaatagtaagttaaaatcagcttgtccacaaacttatagctttttgcaaaatttagctaaataa

SEQ ID NO: 457 - protein, 220 aa, Artificial Sequence
  Mutated sequence
MRPSKKLLIAIISIFLISSVPVSAHADSTTIQQNKDTLSQIVVFPTGNYDKNEANAMVNRLANIDGKYLNALKQNNLKIKLLSGKLTDEKEYAYLKGVVPKGWEGTGKTWDDVPGLGGSTVALRIGFSNKGKGHDAINLELHATAHAIDHIVLNDISKSAQFKQIFAKEGRSLGNVNFLGVYPEEFFAESFAYYYLNQDTNSKLKSACPQTYSFLQNLAK

SEQ ID NO: 458 - DNA, 636 bp, Artificial Sequence
  Mutated sequence
atgggcagcagccatcatcatcatcatcacgaaaacctgtacttccagggcgatagtactactatacaacaaaataaagacacacttagtcaaatagtagtttttccaactggaaattacgataaaaacgaagctaatgctatggtaaatagattagctaatatagatggaaagtatttaaatgcattaaagcaaaataacttaaaaataaaattattaagtggaaagttaacagatgaaaaagaatatgcttatttaaaaggtgtagttcctaagggatgggaaggtactggaaaaacttgggatgatgttccaggtttaggtggaagtacagtagctcttagaataggatttagtaacaaaggtaaagggcatgatgcaataaatttagaattagcagaaacagcacatgcaatagacgcaatagtattaaatgatatatctaaatcagcacaattcaaacaaatatttgctaaagaaggtcgttctttaggtaatgtaaactacttaggtgtatatccagaagaattttttgcagaatcatttgcatattactatttaaatcaagatacaaatagtaagttaaaatcagcttgtccacaaacttatagctttttgcaaaatttagctaaataa

SEQ ID NO: 459 - protein, 220 aa, Artificial Sequence
  Mutated sequence
MRPSKKLLIAIISIFLISSVPVSAHADSTTIQQNKDTLSQIVVFPTGNYDKNEANAMVNRLANIDGKYLNALKQNNLKIKLLSGKLTDEKEYAYLKGVVPKGWEGTGKTWDDVPGLGGSTVALRIGFSNKGKGHDAINLELAETAHAIDAIVLNDISKSAQFKQIFAKEGRSLGNVNYLGVYPEEFFAESFAYYYLNQDTNSKLKSACPQTYSFLQNLAK

SEQ ID NO: 460 - DNA, 636 bp, Artificial Sequence
  Mutated sequence
atgggcagcagccatcatcatcatcatcacgaaaacctgtacttccagggcgatagtactactatacaacaaaataaagacacacttagtcaaatagtagtttttccaactggaaattacgataaaaacgaagctaatgctatggtaaatagattagctaatatagatggaaagtatttaaatgcattaaagcaaaataacttaaaaataaaattattaagtggaaagttaacagatgaaaaagaatatgcttatttaaaaggtgtagttcctaagggatgggaaggtactggaaaaacttgggatgatgttccaggtttaggtggaagtacagtagctcttagaataggatttagtaacaaaggtaaagggcatgatgcaataaatttagaattacatgcaacagcacatgcaatagcacatatagtattaaatgatatatctaaatcagcacaattcaaacaaatatttgctaaagaaggtcgttctttaggtaatgtaaactacttaggtgtatatccagaagaattttttgcagaatcatttgcatattactatttaaatcaagatacaaatagtaagttaaaatcagcttgtccacaaacttatagctttttgcaaaatttagctaaataa

SEQ ID NO: 461 - protein, 220 aa, Artificial Sequence
  Mutated sequence
MRPSKKLLIAIISIFLISSVPVSAHADSTTIQQNKDTLSQIVVFPTGNYDKNEANAMVNRLANIDGKYLNALKQNNLKIKLLSGKLTDEKEYAYLKGVVPKGWEGTGKTWDDVPGLGGSTVALRIGFSNKGKGHDAINLELHATAHAIAHIVLNDISKSAQFKQIFAKEGRSLGNVNYLGVYPEEFFAESFAYYYLNQDTNSKLKSACPQTYSFLQNLAK

SEQ ID NO: 462 - DNA, 636 bp, Artificial Sequence
  Mutated sequence
atgggcagcagccatcatcatcatcatcacgaaaacctgtacttccagggcgatagtactactatacaacaaaataaagacacacttagtcaaatagtagtttttccaactggaaattacgataaaaacgaagctaatgctatggtaaatagattagctaatatagatggaaagtatttaaatgcattaaagcaaaataacttaaaaataaaattattaagtggaaagttaacagatgaaaaagaatatgcttatttaaaaggtgtagttcctaagggatgggaaggtactggaaaaacttgggatgatgttccaggtttaggtggaagtacagtagctcttagaataggatttagtaacaaaggtaaagggcatgatgaaataaatttagaattacatgcaacagcacatgcaatagcacatatagtattaaatgatatatctaaatcagcacaattcaaacaaatatttgctaaagaaggtcgttctttaggtaatgtaaactacttaggtgtatatccagaagaattttttgcagaatcatttgcatattactatttaaatcaagatacaaatagtaagttaaaatcagcttgtccacaaacttatagctttttgcaaaatttagctaaataa

SEQ ID NO: 463 - protein, 220 aa, Artificial Sequence
  Mutated sequence
MRPSKKLLIAIISIFLISSVPVSAHADSTTIQQNKDTLSQIVVFPTGNYDKNEANAMVNRLANIDGKYLNALKQNNLKIKLLSGKLTDEKEYAYLKGVVPKGWEGTGKTWDDVPGLGGSTVALRIGFSNKGKGHDAINLELHETAHAIAHIVLNDISKSAQFKQIFAKEGRSLGNVNYLGVYPEEFFAESFAYYYLNQDTNSKLKSACPQTYSFLQNLAK

SEQ ID NO: 464 - DNA, 636 bp, Artificial Sequence
  Mutated sequence
atgggcagcagccatcatcatcatcatcacgaaaacctgtacttccagggcgatagtactactatacaacaaaataaagacacacttagtcaaatagtagtttttccaactggaaattacgataaaaacgaagctaatgctatggtaaatagattagctaatatagatggaaagtatttaaatgcattaaagcaaaataacttaaaaataaaattattaagtggaaagttaacagatgaaaaagaatatgcttatttaaaaggtgtagttcctaagggatgggaaggtactggaaaaacttgggatgatgttccaggtttaggtggaagtacagtagctcttagaataggatttagtaacaaaggtaaagggcatgatgcaataaatttagaattactacgaacagcacatgcaatagaccatatagtattaaatgatatatctaaatcagcacaattcaaacaaatatttgctaaagaaggtcgttctttaggtaatgtaaactacttaggtgtatatccagaagaattttttgcagaatcatttgcatattactatttaaatcaagatacaaatagtaagttaaaatcagcttgtccacaaacttatagctttttgcaaaatttagctaaataa

SEQ ID NO: 465 - protein, 220 aa, Artificial Sequence
  Mutated sequence
MRPSKKLLIAIISIFLISSVPVSAHADSTTIQQNKDTLSQIVVFPTGNYDKNEANAMVNRLANIDGKYLNALKQNNLKIKLLSGKLTDEKEYAYLKGVVPKGWEGTGKTWDDVPGLGGSTVALRIGFSNKGKGHDAINLELHRTAHAIDHIVLNDISKSAQFKQIFAKEGRSLGNVNYLGVYPEEFFAESFAYYYLNQDTNSKLKSACPQTYSFLQNLAK

SEQ ID NO: 466 - DNA, 36 bp, Artificial Sequence
  Primer
ttagaattagctgaaacagcacatgcaatagaccat

SEQ ID NO: 467 - DNA, 36 bp, Artificial Sequence
  Primer
tgtttcagctaattctaaatttattgcatcatgccc

SEQ ID NO: 468 - DNA, 39 bp, Artificial Sequence
  Primer
gaaacagcagctgcaatagaccatatagtattaaatgat

SEQ ID NO: 469 - DNA, 39 bp, Artificial Sequence
  Primer
tattgcagctgctgtttcatgtaattctaaatttattgc

SEQ ID NO: 470 - DNA, 39 bp, Artificial Sequence
  Primer
gaattagctgaaacagcagctgcaatagaccatatagta

SEQ ID NO: 471 - DNA, 42 bp, Artificial Sequence
  Primer
tattgcagctgctgtttcagctaattctaaatttattgcatc

SEQ ID NO: 472 - DNA, 31 bp, Artificial Sequence
  Primer
gaattacatgcaacagcacatgcaatagacc

SEQ ID NO: 473 - DNA, 31 bp, Artificial Sequence
  Primer
gtgctgttgcatgtaattctaaatttattgc
